(19) United States
(12) Patent Application Publication
(10) Pub. No.: US 2024/0425885 A1
(43) Pub. Date: Dec. 26, 2024

(54) OMNI 90-99, 101, 104-110, 114, 116, 118-123, 125, 126, 128, 129, and 131-138 CRISPR NUCLEASE

(71) Applicant: EmendoBio Inc., Wilmington, DE (US)

(72) Inventors: Lior Izhar, Tel Aviv (IL); Nadav Marbach Bar, Rehovot (IL); Liat Rockah, Rishon LeZion (IL); Nurit Meron, Ramat Gan (IL); Ophir Adiv Tal, Rehovot (IL); Ariel Gispan, Kfar Adumim (IL); Idit Buch, Hod-Hasharon (IL)

(73) Assignee: EmendoBio Inc., Wilmington, DE (US)

(21) Appl. No.: 18/264,552

(22) PCT Filed: Feb. 7, 2022
(86) PCT No.: PCT/US2022/015534

§ 371 Date: Aug. 7, 2023

Related U.S. Application Data
(60) Provisional application No. 63/214,506, filed on Jun. 24, 2021.
(60) Provisional application No. 63/147,166, filed on Feb. 8, 2021.

(51) Int. Cl. C12N 15/90; C12N 9/22; C12N 15/11

(52) U.S. Cl. CPC C12N 15/907; C12N 9/22; C12N 15/11; C12N 2310/20; C12N 2310/531

(57) ABSTRACT

The present invention provides a non-naturally occurring composition comprising a CRISPR nuclease comprising a sequence having at least 95% identity to the amino acid sequence selected from the group consisting of SEQ ID NOs: 1-11 and 13-39 or a nucleic acid molecule comprising a sequence encoding the CRISPR nuclease.

[0001] This application claims the benefit of U.S. Provisional Application No. 63/214,506, filed Jun. 24, 2021, and U.S. Provisional Application No. 63/147,166, filed Feb. 8, 2021, the contents of each of which are hereby incorporated by reference.

[0002] Throughout this application, various publications are referenced, including referenced in parenthesis. The disclosures of all publications mentioned in this application in their entireties are hereby incorporated by reference into this application in order to provide additional description of the art to which this invention pertains and of the features in the art which can be employed with this invention.

### REFERENCE TO SEQUENCE LISTING

[0003] This application incorporates-by-reference nucleotide sequences which are present in the file named “220207_91677-B-PCT_Sequence_Listing_AWG.txt”, which is 980 kilobytes in size, and which was created on Feb. 6, 2022 in the IBM-PC machine format, having an operating system compatibility with MS-Windows, which is contained in the text file filed Feb. 7, 2022 as part of this application.

### FIELD OF THE INVENTION

[0004] The present invention is directed to, inter alia, composition and methods for genome editing.

### BACKGROUND OF THE INVENTION

[0005] The Clustered Regularly Interspaced Short Palindromic Repeat (CRISPR) systems of bacterial and archaeal adaptive immunity show extreme diversity of protein composition and genomic loci architecture. The CRISPR systems have become important tools for research and genome engineering. Nevertheless, many details of CRISPR systems have not been determined and the applicability of CRISPR nucleases may be limited by sequence specificity requirements, expression, or delivery challenges. Different CRISPR nucleases have diverse characteristics such as: size, PAM site, on target activity, specificity, cleavage pattern (e.g. blunt, staggered ends), and prominent pattern of indel formation following cleavage. Different sets of characteristics may be useful for different applications. For example, some CRISPR nucleases may be able to target particular genomic loci that other CRISPR nucleases cannot due to limitations of the PAM site. In addition, some CRISPR nucleases currently in use exhibit pre-immunity, which may limit in vivo applicability. See Charlesworth et al., Nature Medicine (2019) and Wagner et al., Nature Medicine (2019). Accordingly, discovery, engineering, and improvement of novel CRISPR nucleases is of importance.

### SUMMARY OF THE INVENTION

[0006] Disclosed herein are compositions and methods that may be utilized for genomic engineering, epigenomic engineering, genome targeting, genome editing of cells, and/or in vitro diagnostics.

[0007] The disclosed compositions may be utilized for modifying genomic DNA sequences. As used herein, genomic DNA refers to linear and/or chromosomal DNA and/or plasmid or other extrachromosomal DNA sequences present in the cell or cells of interest. In some embodiments, the cell of interest is a eukaryotic cell. In some embodiments, the cell of interest is a prokaryotic cell. In some embodiments, the methods produce double-stranded breaks (DSBs) at pre-determined target sites in a genomic DNA sequence, resulting in mutation, insertion, and/or deletion of a DNA sequence at the target site(s) in a genome.

[0008] Accordingly, in some embodiments, the compositions comprise a Clustered Regularly Interspaced Short Palindromic Repeat (CRISPR) nucleases. In some embodiments, the CRISPR nuclease is a CRISPR-associated protein.

### OMNI CRISPR Nucleases

[0009] Embodiments of the present invention provide for CRISPR nucleases designated as an “OMNI” nuclease as provided in Table 1.

[0010] This invention provides a method of modifying a nucleotide sequence at a target site in the genome of a mammalian cell comprising introducing into the cell (i) a composition comprising a CRISPR nuclease having at least 95% identity to an amino acid sequence selected from the group consisting of SEQ ID NOs: 1-11 and 13-39 or a nucleic acid molecule comprising a sequence encoding a CRISPR nuclease which sequence has at least 95% identity to a nucleic acid sequence selected from the group consisting of SEQ ID NOs: 40-50, 52-89, and 91-117 and (ii) a DNA-targeting RNA molecule, or a DNA polynucleotide encoding a DNA-targeting RNA molecule, comprising a nucleotide sequence that is complementary to a sequence in the target DNA.

[0011] This invention also provides a non-naturally occurring composition comprising a CRISPR associated system comprising:
[0012] a) one or more RNA molecules comprising a guide sequence portion linked to a direct repeat sequence, wherein the guide sequence is capable of hybridizing with a target sequence, or one or more nucleotide sequences encoding the one or more RNA molecules; and
[0013] b) an CRISPR nuclease comprising an amino acid sequence having at least 95% identity to the amino acid sequence selected from the group consisting of SEQ ID NOs: 1-11 and 13-39 or a nucleic acid molecule comprising a sequence encoding the CRISPR nuclease; and
[0014] wherein the one or more RNA molecules hybridize to the target sequence, wherein the target sequence is adjacent to the 3′ end of a complimentary sequence of a Protospacer Adjacent Motif (PAM), and the one or more RNA molecules form a complex with the RNA-guided nuclease.

[0015] This invention also provides a non-naturally occurring composition comprising:
[0016] a) a CRISPR nuclease comprising a sequence having at least 95% identity to the amino acid sequence selected from the group consisting of SEQ ID NOs: 1-11 and 13-39 or a nucleic acid molecule comprising a sequence encoding the CRISPR nuclease; and
[0017] b) one or more RNA molecules, or one or more DNA polynucleotide encoding the one or more RNA molecules, comprising at least one of:
   [0018] i) a nuclease-binding RNA nucleotide sequence capable of interacting with/binding to the CRISPR nuclease; and
   [0019] ii) a DNA-targeting RNA nucleotide sequence comprising a sequence complementary to a sequence in a target DNA sequence,
[0020] wherein the CRISPR nuclease is capable of complexing with the one or more RNA molecules to form a complex capable of hybridizing with the target DNA sequence.

### BRIEF DESCRIPTION OF THE DRAWINGS

[0021] FIGS. 1A-D: The predicted secondary structure of a single guide RNA (sgRNA) (crRNA-tracrRNA) from OMNI-90, OMNI-114, and OMNI-110. FIG. 1A: A representation of a native pre-mature crRNA-tracrRNA duplex for OMNI-90 is shown with the crRNA and tracrRNA portions of the sgRNA noted. FIG. 1B: Example of V1 sgRNA design for OMNI-114. FIG. 1C: Example of V2 sgRNA design for OMNI-114. FIG. 1D: Example of V1 of sgRNA design for OMNI-110 (Table 2).

[0022] FIGS. 2A-C: Various shorter versions of sgRNA 1 which achieve OMNI-90 activity. sgRNA 1 scaffold (V2) was shortened by deleting the terminal hairpin resulting with V3. Deleting the two last hairpins resulted with V4. In all cases OMNI-90 maintained its activity.

[0023] FIGS. 3-45: In vitro TXTL PAM depletion results for OMNI nucleases. The PAM logo is a schematic representation of the ratio of the depleted site (top panel). Depletion ratio (bottom panel, right) of specific PAM sequences (bottom panel, left) from the PAM plasmid library were calculated following NGS of the TXTL reaction. The calculation for each OMNI is based on a 4N window along the 8 bp sequence of the PAM library. The required PAM of the tested OMNI and the level of nuclease activity under the reaction conditions is inferred from the depletion ratio. In vitro PAM depletion results for: FIGS. 3-45: FIG. 3A and FIG. 3B: OMNI-90. FIG. 4: OMNI-91. FIG. 5: OMNI-92. FIG. 6: OMNI-93. FIG. 7: OMNI-94. FIG. 8: OMNI-95. FIG. 9: OMNI-96. FIG. 10: OMNI-97. FIG. 11: OMNI-98. FIG. 12: OMNI-99. FIG. 13: OMNI-101. FIG. 14: OMNI-104. FIG. 15: OMNI-105. FIG. 16: OMNI-106. FIG. 17: OMNI-107. FIG. 18: OMNI-109. FIG. 19: OMNI-110. FIG. 20: OMNI-113 with sgRNA 19. FIG. 21: OMNI-113 with sgRNA 34. FIG. 22: OMNI-113 with sgRNA 39. FIG. 23: OMNI-114. FIG. 24: OMNI-116. FIG. 25: OMNI-118. FIG. 26: OMNI-119. FIG. 27: OMNI-120. FIG. 28: OMNI-121. FIG. 29: OMNI-122. FIG. 30: OMNI-123. FIG. 31: OMNI-125. FIG. 32: OMNI-126. FIG. 33: OMNI-128. FIG. 34: OMNI-129. FIG. 35: OMNI-131. FIG. 36: OMNI-132 with sgRNA 12. FIG. 37: OMNI-132 with sgRNA 32. FIG. 38: OMNI-133. FIG. 39: OMNI-134 with sgRNA 19. FIG. 40: OMNI-134 with sgRNA 34. FIG. 41: OMNI-134 with sgRNA 39. FIG. 42: OMNI-135. FIG. 43: OMNI-136. FIG. 44: OMNI-137. FIG. 45: OMNI-138.

[0024] FIG. 46: The predicted secondary structure of a single guide RNA (sgRNA) (crRNA-tracrRNA) of sgRNA 4. A representation of a crRNA-tracrRNA duplex for OMNI-93 V1 (FIG. 46A) and V2 (FIG. 46B). The crRNA and tracrRNA portions of the sgRNA are noted (see Table 2).

[0025] FIG. 47. OMNI-93 activity and spacer optimization as an RNP in U2OS cells. OMNI-93 CRIPSR nuclease was over-expressed and purified. The purified protein was complexed with synthetic sgRNA to form RNPs. In-vivo assays of the RNPs with various spacer lengths (20-25 nucleotides) of TRAC S119 were electroporated into a U2OS cell line and editing levels (indels) were assessed by next generation sequencing (NGS).

### DETAILED DESCRIPTION

[0026] According to some aspects of the invention, the disclosed compositions comprise a Clustered Regularly Interspaced Short Palindromic Repeats (CRISPR) nuclease and/or a nucleic acid molecule comprising a sequence encoding the same.

[0027] Table 1 lists novel CRISPR nucleases, as well as substitutions at one or more positions within each nuclease which convert the nuclease to a nickase or catalytically dead nuclease.

[0028] Table 2 provides crRNA, tracrRNA, and single-guide RNA (sgRNA) sequences, and portions of crRNA, tracrRNA, and sgRNA sequences, that are compatible with each listed CRISPR nuclease. Accordingly, a crRNA molecule capable of binding and targeting an OMNI nuclease listed in Table 2 as part of a crRNA:tracrRNA complex may comprise any crRNA sequence listed in Table 2. Similarly, a tracrRNA molecule capable of binding and targeting an OMNI nuclease listed in Table 2 as part of a crRNA:tracrRNA complex may comprise any tracrRNA sequence listed in Table 2. Also, a single-guide RNA molecule capable of binding and targeting an OMNI nuclease listed in Table 2 may comprise any sequence listed in Table 2.

[0029] For example, a crRNA molecule of OMNI-90 nuclease (SEQ ID NO: 1) may comprise a sequence of any one of SEQ ID NOs: 118-121; a tracrRNA molecule of OMNI-90 nuclease may comprise a sequence of any one of SEQ ID NOs: 122-130 and 133; and a sgRNA molecule of OMNI-90 nuclease may comprise a sequence of any one of SEQ ID NOs: 118-135. Other crRNA molecules, tracrRNA molecules, or sgRNA molecules for each OMNI nuclease may be derived from the sequences listed in Table 2 in the same manner.

[0030] The invention provides a non-naturally occurring composition comprising a CRISPR nuclease comprising a sequence having at least 90% identity to the amino acid sequence selected from the group consisting of SEQ ID NOs: 1-11 and 13-39, or a nucleic acid molecule comprising a sequence encoding the CRISPR nuclease. The nucleic acid molecule may be, for example, a DNA molecule or an RNA molecule.

[0031] In some embodiments, the CRISPR nuclease has full catalytic activity, is a nickase, or is catalytically inactive, and is fused to a DNA-interacting or a modifying protein. For example, the CRISPR nuclease may be fused to deaminase protein for use in base editing methods. In another example, the CRISPR nuclease may be fused to a reverse transcriptase for use in prime editing methods.

[0032] In some embodiments, the composition further comprises one or more RNA molecules, or a DNA polynucleotide encoding any one of the one or more RNA molecules, wherein the one or more RNA molecules and the CRISPR nuclease do not naturally occur together and the one or more RNA molecules are configured to form a complex with the CRISPR nuclease and/or target the complex to a target site.

[0033] In some embodiments, the CRISPR nuclease comprises a sequence having at least 90% identity to the amino acid sequence set forth in SEQ ID NO: 1, and at least one RNA molecule comprises a sequence selected from the group consisting of SEQ ID NOs: 118-135.

[0034] In some embodiments, the CRISPR nuclease comprises a sequence having at least 90% identity to the amino acid sequence set forth in SEQ ID NO: 1 and at least one RNA molecule is a CRISPR RNA (crRNA) molecule comprising a guide sequence portion and a sequence selected from the group consisting of SEQ ID NOs: 118-121.

[0035] In some embodiments, the composition further comprises a transactivating CRISPR RNA (tracrRNA) molecule comprising a sequence set forth in the group consisting of SEQ ID NOs: 122-130 and 133.

[0036] In some embodiments, wherein the CRISPR nuclease comprises a sequence having at least 90% identity to the amino acid sequence set forth in SEQ ID NO: 1 and at least one RNA molecule is a single-guide RNA (sgRNA) molecule comprising a guide sequence portion and a sequence selected from the group consisting of SEQ ID NOs: 118-135.

[0037] In some embodiments, the CRISPR nuclease comprises a sequence having at least 90% identity to the amino acid sequence set forth in SEQ ID NO: 2, and at least one RNA molecule comprises a sequence selected from the group consisting of SEQ ID NOs: 136-146.

[0038] In some embodiments, the CRISPR nuclease comprises a sequence having at least 90% identity to the amino acid sequence set forth in SEQ ID NO: 2 and at least one RNA molecule is a CRISPR RNA (crRNA) molecule comprising a guide sequence portion and a sequence selected from the group consisting of SEQ ID NOs: 136-139.

[0039] In some embodiments, the composition further comprises a transactivating CRISPR RNA (tracrRNA) molecule comprising a sequence set forth in the group consisting of SEQ ID NOs: 140-145.

[0040] In some embodiments, the CRISPR nuclease comprises a sequence having at least 90% identity to the amino acid sequence set forth in SEQ ID NO: 2 and at least one RNA molecule is a single-guide RNA (sgRNA) molecule comprising a guide sequence portion and a sequence selected from the group consisting of SEQ ID NOs: 136-146.

[0041] In some embodiments, the CRISPR nuclease comprises a sequence having at least 90% identity to the amino acid sequence set forth in SEQ ID NO: 3, and at least one RNA molecule comprises a sequence selected from the group consisting of SEQ ID NOs: 147-162.

[0042] In some embodiments, the CRISPR nuclease comprises a sequence having at least 90% identity to the amino acid sequence set forth in SEQ ID NO: 3 and at least one RNA molecule is a CRISPR RNA (crRNA) molecule comprising a guide sequence portion and a sequence selected from the group consisting of SEQ ID NOs: 147-150.

[0043] In some embodiments, the composition further comprises a transactivating CRISPR RNA (tracrRNA) molecule comprising a sequence set forth in the group consisting of SEQ ID NOs: 151-158, 161, and 162.

[0044] In some embodiments, the CRISPR nuclease comprises a sequence having at least 90% identity to the amino acid sequence set forth in SEQ ID NO: 3 and at least one RNA molecule is a single-guide RNA (sgRNA) molecule comprising a guide sequence portion and a sequence selected from the group consisting of SEQ ID NOs: 147-162.

[0045] In some embodiments, the CRISPR nuclease comprises a sequence having at least 90% identity to the amino acid sequence set forth in SEQ ID NO: 4 and at least one RNA molecule comprises a sequence selected from the group consisting of SEQ ID NOs: 163-181.

[0046] In some embodiments, the CRISPR nuclease comprises a sequence having at least 90% identity to the amino acid sequence set forth in SEQ ID NO: 4 and at least one RNA molecule is a CRISPR RNA (crRNA) molecule comprising a guide sequence portion and a sequence selected from the group consisting of SEQ ID NOs: 163-166 and 178-181

[0047] In some embodiments, the composition further comprises a transactivating CRISPR RNA (tracrRNA) molecule comprising a sequence set forth in the group consisting of SEQ ID NOs: 167-175.

[0048] In some embodiments, the CRISPR nuclease comprises a sequence having at least 90% identity to the amino acid sequence set forth in SEQ ID NO: 4 and at least one RNA molecule is a single-guide RNA (sgRNA) molecule comprising a guide sequence portion and a sequence selected from the group consisting of SEQ ID NOs: 163-181.

[0049] In some embodiments, the CRISPR nuclease comprises a sequence having at least 90% identity to the amino acid sequence set forth in SEQ ID NO: 5, and at least one RNA molecule comprises a sequence selected from the group consisting of SEQ ID NOs: 182-197.

[0050] In some embodiments, the CRISPR nuclease comprises a sequence having at least 90% identity to the amino acid sequence set forth in SEQ ID NO: 5 and at least one RNA molecule is a CRISPR RNA (crRNA) molecule comprising a guide sequence portion and a sequence selected from the group consisting of SEQ ID NOs: 182-185.

[0051] In some embodiments, the composition further comprises a transactivating CRISPR RNA (tracrRNA) molecule comprising a sequence set forth in the group consisting of SEQ ID NOs: 186-193, 196, and 197.

[0052] In some embodiments, the CRISPR nuclease comprises a sequence having at least 90% identity to the amino acid sequence set forth in SEQ ID NO: 5 and at least one RNA molecule is a single-guide RNA (sgRNA) molecule comprising a guide sequence portion and a sequence selected from the group consisting of SEQ ID NOs: 182-197.

[0053] In some embodiments, the CRISPR nuclease comprises a sequence having at least 90% identity to the amino acid sequence set forth in SEQ ID NO: 6, and at least one RNA molecule comprises a sequence selected from the group consisting of SEQ ID NOs: 198-212.

[0054] In some embodiments, the CRISPR nuclease comprises a sequence having at least 90% identity to the amino acid sequence set forth in SEQ ID NO: 6 and at least one RNA molecule is a CRISPR RNA (crRNA) molecule comprising a guide sequence portion and a sequence selected from the group consisting of SEQ ID NOs: 198-201.

[0055] In some embodiments, the composition further comprises a transactivating CRISPR RNA (tracrRNA) molecule comprising a sequence set forth in the group consisting of SEQ ID NOs: 202-209 and 212.

[0056] In some embodiments, the CRISPR nuclease comprises a sequence having at least 90% identity to the amino acid sequence set forth in SEQ ID NO: 6 and at least one RNA molecule is a single-guide RNA (sgRNA) molecule comprising a guide sequence portion and a sequence selected from the group consisting of SEQ ID NOs: 198-212.

[0057] In some embodiments, the CRISPR nuclease comprises a sequence having at least 90% identity to the amino acid sequence set forth in SEQ ID NO: 7, and at least one RNA molecule comprises a sequence selected from the group consisting of SEQ ID NOs: 213-234.

[0058] In some embodiments, the CRISPR nuclease comprises a sequence having at least 90% identity to the amino acid sequence set forth in SEQ ID NO: 7 and at least one RNA molecule is a CRISPR RNA (crRNA) molecule comprising a guide sequence portion and a sequence selected from the group consisting of SEQ ID NOs: 213-216 and 227-230.

[0059] In some embodiments, the composition further comprises a transactivating CRISPR RNA (tracrRNA) molecule comprising a sequence set forth in the group consisting of SEQ ID NOs: 217-224 and 231-234.

[0060] In some embodiments, the CRISPR nuclease comprises a sequence having at least 90% identity to the amino acid sequence set forth in SEQ ID NO: 7 and at least one RNA molecule is a single-guide RNA (sgRNA) molecule comprising a guide sequence portion and a sequence selected from the group consisting of SEQ ID NOs: 213-234.

[0061] In some embodiments, the CRISPR nuclease comprises a sequence having at least 90% identity to the amino acid sequence set forth in SEQ ID NO: 8, and at least one RNA molecule comprises a sequence selected from the group consisting of SEQ ID NOs: 235-252.

[0062] In some embodiments, the CRISPR nuclease comprises a sequence having at least 90% identity to the amino acid sequence set forth in SEQ ID NO: 8 and at least one RNA molecule is a CRISPR RNA (crRNA) molecule comprising a guide sequence portion and a sequence selected from the group consisting of SEQ ID NOs: 235-238.

[0063] In some embodiments, the composition further comprises a transactivating CRISPR RNA (tracrRNA) molecule comprising a sequence set forth in the group consisting of SEQ ID NOs: 239-247 and 250-252.

[0064] In some embodiments, the CRISPR nuclease comprises a sequence having at least 90% identity to the amino acid sequence set forth in SEQ ID NO: 8 and at least one RNA molecule is a single-guide RNA (sgRNA) molecule comprising a guide sequence portion and a sequence selected from the group consisting of SEQ ID NOs: 235-252.

[0065] In some embodiments, the CRISPR nuclease comprises a sequence having at least 90% identity to the amino acid sequence set forth in SEQ ID NO: 9, and at least one RNA molecule comprises a sequence selected from the group consisting of SEQ ID NOs: 253-265.

[0066] In some embodiments, the CRISPR nuclease comprises a sequence having at least 90% identity to the amino acid sequence set forth in SEQ ID NO: 9 and at least one RNA molecule is a CRISPR RNA (crRNA) molecule comprising a guide sequence portion and a sequence selected from the group consisting of SEQ ID NOs: 253-256.

[0067] In some embodiments, the composition further comprises a transactivating CRISPR RNA (tracrRNA) molecule comprising a sequence set forth in the group consisting of SEQ ID NOs: 257-264.

[0068] In some embodiments, the CRISPR nuclease comprises a sequence having at least 90% identity to the amino acid sequence set forth in SEQ ID NO: 9 and at least one RNA molecule is a single-guide RNA (sgRNA) molecule comprising a guide sequence portion and a sequence selected from the group consisting of SEQ ID NOs: 253-265.

[0069] In some embodiments, the CRISPR nuclease comprises a sequence having at least 90% identity to the amino acid sequence set forth in SEQ ID NO: 10, and at least one RNA molecule comprises a sequence selected from the group consisting of SEQ ID NOs: 266-279.

[0070] In some embodiments, the CRISPR nuclease comprises a sequence having at least 90% identity to the amino acid sequence set forth in SEQ ID NO: 10 and at least one RNA molecule is a CRISPR RNA (crRNA) molecule comprising a guide sequence portion and a sequence selected from the group consisting of SEQ ID NOs: 266-269.

[0071] In some embodiments, the composition further comprises a transactivating CRISPR RNA (tracrRNA) molecule comprising a sequence set forth in the group consisting of SEQ ID NOs: 270-278.

[0072] In some embodiments, the CRISPR nuclease comprises a sequence having at least 90% identity to the amino acid sequence set forth in SEQ ID NO: 10 and at least one RNA molecule is a single-guide RNA (sgRNA) molecule comprising a guide sequence portion and a sequence selected from the group consisting of SEQ ID NOs: 266-279.

[0073] In some embodiments, the CRISPR nuclease comprises a sequence having at least 90% identity to the amino acid sequence set forth in SEQ ID NO: 11 and at least one RNA molecule comprises a sequence selected from the group consisting of SEQ ID NOs: 280-287, 302-322, UCUUUGUGU, and UUUGUGU.

[0074] In some embodiments, the CRISPR nuclease comprises a sequence having at least 90% identity to the amino acid sequence set forth in SEQ ID NO: 11 and at least one RNA molecule is a CRISPR RNA (crRNA) molecule comprising a guide sequence portion and a sequence selected from the group consisting of SEQ ID NOs: 280-282, 302-305, and 313-316.

[0075] In some embodiments, the composition further comprises a transactivating CRISPR RNA (tracrRNA) molecule comprising a sequence set forth in the group consisting of SEQ ID NOs: 283-286, 306-311, 317-321, UCUUUGUGU, and UUUGUGU.

[0076] In some embodiments, the CRISPR nuclease comprises a sequence having at least 90% identity to the amino acid sequence set forth in SEQ ID NO: 11 and at least one RNA molecule is a single-guide RNA (sgRNA) molecule comprising a guide sequence portion and a sequence selected from the group consisting of SEQ ID NOs: 280-287, 302-322, UCUUUGUGU, and UUUGUGU.

[0077] In some embodiments, the CRISPR nuclease comprises a sequence having at least 90% identity to the amino acid sequence set forth in SEQ ID NO: 13 and at least one RNA molecule comprises a sequence selected from the group consisting of SEQ ID NOs: 280-287, 302-322, UCUUUGUGU, and UUUGUGU.

[0078] In some embodiments, the CRISPR nuclease comprises a sequence having at least 90% identity to the amino acid sequence set forth in SEQ ID NO: 13 and at least one RNA molecule is a CRISPR RNA (crRNA) molecule comprising a guide sequence portion and a sequence selected from the group consisting of SEQ ID NOs: 280-282, 302-305, and 313-316.

[0079] In some embodiments, the composition further comprises a transactivating CRISPR RNA (tracrRNA) molecule comprising a sequence set forth in the group consisting of SEQ ID NOs: 283-286, 306-311, 317-321, UCUUUGUGU, and UUUGUGU.

[0080] In some embodiments, the CRISPR nuclease comprises a sequence having at least 90% identity to the amino acid sequence set forth in SEQ ID NO: 13 and at least one RNA molecule is a single-guide RNA (sgRNA) molecule comprising a guide sequence portion and a sequence selected from the group consisting of SEQ ID NOs: 280-287, 302-322, UCUUUGUGU, and UUUGUGU.

[0081] In some embodiments, the CRISPR nuclease comprises a sequence having at least 90% identity to the amino acid sequence set forth in SEQ ID NO: 14 and at least one RNA molecule comprises a sequence selected from the group consisting of SEQ ID NOs: 280-287, 302-322, UCUUUGUGU, and UUUGUGU.

[0082] In some embodiments, the CRISPR nuclease comprises a sequence having at least 90% identity to the amino acid sequence set forth in SEQ ID NO: 14 and at least one RNA molecule is a CRISPR RNA (crRNA) molecule comprising a guide sequence portion and a sequence selected from the group consisting of SEQ ID NOs: 280-282, 302-305, and 313-316.

[0083] In some embodiments, the composition further comprises a transactivating CRISPR RNA (tracrRNA) molecule comprising a sequence set forth in the group consisting of SEQ ID NOs: 283-286, 306-311, 317-321, UCUUUGUGU, and UUUGUGU.

[0084] In some embodiments, the CRISPR nuclease comprises a sequence having at least 90% identity to the amino acid sequence set forth in SEQ ID NO: 14 and at least one RNA molecule is a single-guide RNA (sgRNA) molecule comprising a guide sequence portion and a sequence selected from the group consisting of SEQ ID NOs: 280-287, 302-322, UCUUUGUGU, and UUUGUGU.

[0085] In some embodiments, the CRISPR nuclease comprises a sequence having at least 90% identity to the amino acid sequence set forth in SEQ ID NO: 15, and at least one RNA molecule comprises a sequence selected from the group consisting of SEQ ID NOs: 323-335 and GGCUUUGCC.

[0086] In some embodiments, the CRISPR nuclease comprises a sequence having at least 90% identity to the amino acid sequence set forth in SEQ ID NO: 15 and at least one RNA molecule is a CRISPR RNA (crRNA) molecule comprising a guide sequence portion and a sequence selected from the group consisting of SEQ ID NOs: 323-326.

[0087] In some embodiments, the composition further comprises a transactivating CRISPR RNA (tracrRNA) molecule comprising a sequence set forth in the group consisting of SEQ ID NOs: 327-334 and GGCUUUGCC.

[0088] In some embodiments, the CRISPR nuclease comprises a sequence having at least 90% identity to the amino acid sequence set forth in SEQ ID NO: 15 and at least one RNA molecule is a single-guide RNA (sgRNA) molecule comprising a guide sequence portion and a sequence selected from the group consisting of SEQ ID NOs: 323-335 and GGCUUUGCC.

[0089] In some embodiments, the CRISPR nuclease comprises a sequence having at least 90% identity to the amino acid sequence set forth in SEQ ID NO: 16, and at least one RNA molecule comprises a sequence selected from the group consisting of SEQ ID NOs: 336-354.

[0090] In some embodiments, the CRISPR nuclease comprises a sequence having at least 90% identity to the amino acid sequence set forth in SEQ ID NO: 16 and at least one RNA molecule is a CRISPR RNA (crRNA) molecule comprising a guide sequence portion and a sequence selected from the group consisting of SEQ ID NOs: 336-339.

[0091] In some embodiments, the composition further comprises a transactivating CRISPR RNA (tracrRNA) molecule comprising a sequence set forth in the group consisting of SEQ ID NOs: 340-349 and 352-354.

[0092] In some embodiments, the CRISPR nuclease comprises a sequence having at least 90% identity to the amino acid sequence set forth in SEQ ID NO: 16 and at least one RNA molecule is a single-guide RNA (sgRNA) molecule comprising a guide sequence portion and a sequence selected from the group consisting of SEQ ID NOs: 336-354.

[0093] In some embodiments, the CRISPR nuclease comprises a sequence having at least 90% identity to the amino acid sequence set forth in SEQ ID NO: 17, and at least one RNA molecule comprises a sequence selected from the group consisting of SEQ ID NOs: 355-366.

[0094] In some embodiments, the CRISPR nuclease comprises a sequence having at least 90% identity to the amino acid sequence set forth in SEQ ID NO: 17 and at least one RNA molecule is a CRISPR RNA (crRNA) molecule comprising a guide sequence portion and a sequence selected from the group consisting of SEQ ID NOs: 355-358.

[0095] In some embodiments, the composition further comprises a transactivating CRISPR RNA (tracrRNA) molecule comprising a sequence set forth in the group consisting of SEQ ID NOs: 359-365.

[0096] In some embodiments, the CRISPR nuclease comprises a sequence having at least 90% identity to the amino acid sequence set forth in SEQ ID NO: 17 and at least one RNA molecule is a single-guide RNA (sgRNA) molecule comprising a guide sequence portion and a sequence selected from the group consisting of SEQ ID NOs: 355-366.

[0097] In some embodiments, the CRISPR nuclease comprises a sequence having at least 90% identity to the amino acid sequence set forth in SEQ ID NO: 18, and at least one RNA molecule comprises a sequence selected from the group consisting of SEQ ID NOs: 367-380.

[0098] In some embodiments, the CRISPR nuclease comprises a sequence having at least 90% identity to the amino acid sequence set forth in SEQ ID NO: 18 and at least one RNA molecule is a CRISPR RNA (crRNA) molecule comprising a guide sequence portion and a sequence selected from the group consisting of SEQ ID NOs: 367-370.

[0099] In some embodiments, the composition further comprises a transactivating CRISPR RNA (tracrRNA) molecule comprising a sequence set forth in the group consisting of SEQ ID NOs: 371-379.

[0100] In some embodiments, the CRISPR nuclease comprises a sequence having at least 90% identity to the amino acid sequence set forth in SEQ ID NO: 18 and at least one RNA molecule is a single-guide RNA (sgRNA) molecule comprising a guide sequence portion and a sequence selected from the group consisting of SEQ ID NOs: 367-380.

[0101] In some embodiments, the CRISPR nuclease comprises a sequence having at least 90% identity to the amino acid sequence set forth in SEQ ID NO: 19, and at least one RNA molecule comprises a sequence selected from the group consisting of SEQ ID NOs: 381-395, 600-614, 679-695, CGUUCAAAU, and UUAAAGUAA.

[0102] In some embodiments, the CRISPR nuclease comprises a sequence having at least 90% identity to the amino acid sequence set forth in SEQ ID NO: 19 and at least one RNA molecule is a CRISPR RNA (crRNA) molecule comprising a guide sequence portion and a sequence selected from the group consisting of SEQ ID NOs: 381-384, 600-603, 679-682, and 691-694.

[0103] In some embodiments, the composition further comprises a transactivating CRISPR RNA (tracrRNA) molecule comprising a sequence set forth in the group consisting of SEQ ID NOs: 385-392, 395, 604-611, 614, 683-688, 695, UUAAAGUAA, and CGUUCAAAU.

[0104] In some embodiments, the CRISPR nuclease comprises a sequence having at least 90% identity to the amino acid sequence set forth in SEQ ID NO: 19 and at least one RNA molecule is a single-guide RNA (sgRNA) molecule comprising a guide sequence portion and a sequence selected from the group consisting of SEQ ID NOs: 381-395, 600-614, 679-695, CGUUCAAAU, and UUAAAGUAA.

[0105] In some embodiments, the CRISPR nuclease comprises a sequence having at least 90% identity to the amino acid sequence set forth in SEQ ID NO: 20 and at least one RNA molecule comprises a sequence selected from the group consisting of SEQ ID NOs: 396-418, CAAUAAAAC, and CAAUAUAAC.

[0106] In some embodiments, the CRISPR nuclease comprises a sequence having at least 90% identity to the amino acid sequence set forth in SEQ ID NO: 20 and at least one RNA molecule is a CRISPR RNA (crRNA) molecule comprising a guide sequence portion and a sequence selected from the group consisting of SEQ ID NOs: 396-399 and 409-412.

[0107] In some embodiments, the composition further comprises a transactivating CRISPR RNA (tracrRNA) molecule comprising a sequence set forth in the group consisting of SEQ ID NOs: 400-406, 413-418, CAAUAAAAC, and CAAUAUAAC.

[0108] In some embodiments, the CRISPR nuclease comprises a sequence having at least 90% identity to the amino acid sequence set forth in SEQ ID NO: 20 and at least one RNA molecule is a single-guide RNA (sgRNA) molecule comprising a guide sequence portion and a sequence selected from the group consisting of SEQ ID NOs: 396-418, CAAUAAAAC, and CAAUAUAAC.

[0109] In some embodiments, the CRISPR nuclease comprises a sequence having at least 90% identity to the amino acid sequence set forth in SEQ ID NO: 21 and at least one RNA molecule comprises a sequence selected from the group consisting of SEQ ID NOs: 396-418, CAAUAAAAC, and CAAUAUAAC.

[0110] In some embodiments, the CRISPR nuclease comprises a sequence having at least 90% identity to the amino acid sequence set forth in SEQ ID NO: 21 and at least one RNA molecule is a CRISPR RNA (crRNA) molecule comprising a guide sequence portion and a sequence selected from the group consisting of SEQ ID NOs: 396-399 and 409-412.

[0111] In some embodiments, the composition further comprises a transactivating CRISPR RNA (tracrRNA) molecule comprising a sequence set forth in the group consisting of SEQ ID NOs: 400-406, 413-418, CAAUAAAAC, and CAAUAUAAC.

[0112] In some embodiments, the CRISPR nuclease comprises a sequence having at least 90% identity to the amino acid sequence set forth in SEQ ID NO: 21 and at least one RNA molecule is a single-guide RNA (sgRNA) molecule comprising a guide sequence portion and a sequence selected from the group consisting of SEQ ID NOs: 396-418, CAAUAAAAC, and CAAUAUAAC.

[0113] In some embodiments, the CRISPR nuclease comprises a sequence having at least 90% identity to the amino acid sequence set forth in SEQ ID NO: 22, and at least one RNA molecule comprises a sequence selected from the group consisting of SEQ ID NOs: 419-434.

[0114] In some embodiments, the CRISPR nuclease comprises a sequence having at least 90% identity to the amino acid sequence set forth in SEQ ID NO: 22 and at least one RNA molecule is a CRISPR RNA (crRNA) molecule comprising a guide sequence portion and a sequence selected from the group consisting of SEQ ID NOs: 419-422.

[0115] In some embodiments, the composition further comprises a transactivating CRISPR RNA (tracrRNA) molecule comprising a sequence set forth in the group consisting of SEQ ID NOs: 423-430, 433, and 434.

[0116] In some embodiments, the CRISPR nuclease comprises a sequence having at least 90% identity to the amino acid sequence set forth in SEQ ID NO: 22 and at least one RNA molecule is a single-guide RNA (sgRNA) molecule comprising a guide sequence portion and a sequence selected from the group consisting of SEQ ID NOs: 419-434.

[0117] In some embodiments, the CRISPR nuclease comprises a sequence having at least 90% identity to the amino acid sequence set forth in SEQ ID NO: 23, and at least one RNA molecule comprises a sequence selected from the group consisting of SEQ ID NOs: 435-447.

[0118] In some embodiments, the CRISPR nuclease comprises a sequence having at least 90% identity to the amino acid sequence set forth in SEQ ID NO: 23 and at least one RNA molecule is a CRISPR RNA (crRNA) molecule comprising a guide sequence portion and a sequence selected from the group consisting of SEQ ID NOs: 435-438.

[0119] In some embodiments, the composition further comprises a transactivating CRISPR RNA (tracrRNA) molecule comprising a sequence set forth in the group consisting of SEQ ID NOs: 439-446.

[0120] In some embodiments, the CRISPR nuclease comprises a sequence having at least 90% identity to the amino acid sequence set forth in SEQ ID NO: 23 and at least one RNA molecule is a single-guide RNA (sgRNA) molecule comprising a guide sequence portion and a sequence selected from the group consisting of SEQ ID NOs: 435-447.

[0121] In some embodiments, the CRISPR nuclease comprises a sequence having at least 90% identity to the amino acid sequence set forth in SEQ ID NO: 24, and at least one RNA molecule comprises a sequence selected from the group consisting of SEQ ID NOs: 448-464, and GGUUUAACC.

[0122] In some embodiments, the CRISPR nuclease comprises a sequence having at least 90% identity to the amino acid sequence set forth in SEQ ID NO: 24 and at least one RNA molecule is a CRISPR RNA (crRNA) molecule comprising a guide sequence portion and a sequence selected from the group consisting of SEQ ID NOs: 448-451.

[0123] In some embodiments, the composition further comprises a transactivating CRISPR RNA (tracrRNA) molecule comprising a sequence set forth in the group consisting of SEQ ID NOs: 452-460, 463, and GGUUUAACC.

[0124] In some embodiments, the CRISPR nuclease comprises a sequence having at least 90% identity to the amino acid sequence set forth in SEQ ID NO: 24 and at least one RNA molecule is a single-guide RNA (sgRNA) molecule comprising a guide sequence portion and a sequence selected from the group consisting of SEQ ID NOs: 448-464, and GGUUUAACC.

[0125] In some embodiments, the CRISPR nuclease comprises a sequence having at least 90% identity to the amino acid sequence set forth in SEQ ID NO: 25, and at least one RNA molecule comprises a sequence selected from the group consisting of SEQ ID NOs: 465-476.

[0126] In some embodiments, the CRISPR nuclease comprises a sequence having at least 90% identity to the amino acid sequence set forth in SEQ ID NO: 25 and at least one RNA molecule is a CRISPR RNA (crRNA) molecule comprising a guide sequence portion and a sequence selected from the group consisting of SEQ ID NOs: 465-468.

[0127] In some embodiments, the composition further comprises a transactivating CRISPR RNA (tracrRNA) molecule comprising a sequence set forth in the group consisting of SEQ ID NOs: 469-475.

[0128] In some embodiments, the CRISPR nuclease comprises a sequence having at least 90% identity to the amino acid sequence set forth in SEQ ID NO: 25 and at least one RNA molecule is a single-guide RNA (sgRNA) molecule comprising a guide sequence portion and a sequence selected from the group consisting of SEQ ID NOs: 465-476.

[0129] In some embodiments, the CRISPR nuclease comprises a sequence having at least 90% identity to the amino acid sequence set forth in SEQ ID NO: 26, and at least one RNA molecule comprises a sequence selected from the group consisting of SEQ ID NOs: 477-490.

[0130] In some embodiments, the CRISPR nuclease comprises a sequence having at least 90% identity to the amino acid sequence set forth in SEQ ID NO: 26 and at least one RNA molecule is a CRISPR RNA (crRNA) molecule comprising a guide sequence portion and a sequence selected from the group consisting of SEQ ID NOs: 477-480.

[0131] In some embodiments, the composition further comprises a transactivating CRISPR RNA (tracrRNA) molecule comprising a sequence set forth in the group consisting of SEQ ID NOs: 481-489.

[0132] In some embodiments, the CRISPR nuclease comprises a sequence having at least 90% identity to the amino acid sequence set forth in SEQ ID NO: 26 and at least one RNA molecule is a single-guide RNA (sgRNA) molecule comprising a guide sequence portion and a sequence selected from the group consisting of SEQ ID NOs: 477-490.

[0133] In some embodiments, the CRISPR nuclease comprises a sequence having at least 90% identity to the amino acid sequence set forth in SEQ ID NO: 27, and at least one RNA molecule comprises a sequence selected from the group consisting of SEQ ID NOs: 491-503.

[0134] In some embodiments, the CRISPR nuclease comprises a sequence having at least 90% identity to the amino acid sequence set forth in SEQ ID NO: 27 and at least one RNA molecule is a CRISPR RNA (crRNA) molecule comprising a guide sequence portion and a sequence selected from the group consisting of SEQ ID NOs: 491-494.

[0135] In some embodiments, the composition further comprises a transactivating CRISPR RNA (tracrRNA) molecule comprising a sequence set forth in the group consisting of SEQ ID NOs: 495-502.

[0136] In some embodiments, the CRISPR nuclease comprises a sequence having at least 90% identity to the amino acid sequence set forth in SEQ ID NO: 27 and at least one RNA molecule is a single-guide RNA (sgRNA) molecule comprising a guide sequence portion and a sequence selected from the group consisting of SEQ ID NOs: 491-503.

[0137] In some embodiments, the CRISPR nuclease comprises a sequence having at least 90% identity to the amino acid sequence set forth in SEQ ID NO: 28, and at least one RNA molecule comprises a sequence selected from the group consisting of SEQ ID NOs: 504-516.

[0138] In some embodiments, the CRISPR nuclease comprises a sequence having at least 90% identity to the amino acid sequence set forth in SEQ ID NO: 28 and at least one RNA molecule is a CRISPR RNA (crRNA) molecule comprising a guide sequence portion and a sequence selected from the group consisting of SEQ ID NOs: 504-507.

[0139] In some embodiments, the composition further comprises a transactivating CRISPR RNA (tracrRNA) molecule comprising a sequence set forth in the group consisting of SEQ ID NOs: 508-515.

[0140] In some embodiments, the CRISPR nuclease comprises a sequence having at least 90% identity to the amino acid sequence set forth in SEQ ID NO: 28 and at least one RNA molecule is a single-guide RNA (sgRNA) molecule comprising a guide sequence portion and a sequence selected from the group consisting of SEQ ID NOs: 504-516.

[0141] In some embodiments, the CRISPR nuclease comprises a sequence having at least 90% identity to the amino acid sequence set forth in SEQ ID NO: 29, and at least one RNA molecule comprises a sequence selected from the group consisting of SEQ ID NOs: 517-530.

[0142] In some embodiments, the CRISPR nuclease comprises a sequence having at least 90% identity to the amino acid sequence set forth in SEQ ID NO: 29 and at least one RNA molecule is a CRISPR RNA (crRNA) molecule comprising a guide sequence portion and a sequence selected from the group consisting of SEQ ID NOs: 517-520.

[0143] In some embodiments, the composition further comprises a transactivating CRISPR RNA (tracrRNA) molecule comprising a sequence set forth in the group consisting of SEQ ID NOs: 521-529.

[0144] In some embodiments, the CRISPR nuclease comprises a sequence having at least 90% identity to the amino acid sequence set forth in SEQ ID NO: 29 and at least one RNA molecule is a single-guide RNA (sgRNA) molecule comprising a guide sequence portion and a sequence selected from the group consisting of SEQ ID NOs: 517-530.

[0145] In some embodiments, the CRISPR nuclease comprises a sequence having at least 90% identity to the amino acid sequence set forth in SEQ ID NO: 30, and at least one RNA molecule comprises a sequence selected from the group consisting of SEQ ID NOs: 531-544.

[0146] In some embodiments, the CRISPR nuclease comprises a sequence having at least 90% identity to the amino acid sequence set forth in SEQ ID NO: 30 and at least one RNA molecule is a CRISPR RNA (crRNA) molecule comprising a guide sequence portion and a sequence selected from the group consisting of SEQ ID NOs: 531-534.

[0147] In some embodiments, the composition further comprises a transactivating CRISPR RNA (tracrRNA) molecule comprising a sequence set forth in the group consisting of SEQ ID NOs: 535-543.

[0148] In some embodiments, the CRISPR nuclease comprises a sequence having at least 90% identity to the amino acid sequence set forth in SEQ ID NO: 30 and at least one RNA molecule is a single-guide RNA (sgRNA) molecule comprising a guide sequence portion and a sequence selected from the group consisting of SEQ ID NOs: 531-544.

[0149] In some embodiments, the CRISPR nuclease comprises a sequence having at least 90% identity to the amino acid sequence set forth in SEQ ID NO: 31, and at least one RNA molecule comprises a sequence selected from the group consisting of SEQ ID NOs: 545-560.

[0150] In some embodiments, the CRISPR nuclease comprises a sequence having at least 90% identity to the amino acid sequence set forth in SEQ ID NO: 31 and at least one RNA molecule is a CRISPR RNA (crRNA) molecule comprising a guide sequence portion and a sequence selected from the group consisting of SEQ ID NOs: 545-548.

[0151] In some embodiments, the composition further comprises a transactivating CRISPR RNA (tracrRNA) molecule comprising a sequence set forth in the group consisting of SEQ ID NOs: 549-556, 559, and 560.

[0152] In some embodiments, the CRISPR nuclease comprises a sequence having at least 90% identity to the amino acid sequence set forth in SEQ ID NO: 31 and at least one RNA molecule is a single-guide RNA (sgRNA) molecule comprising a guide sequence portion and a sequence selected from the group consisting of SEQ ID NOs: 545-560.

[0153] In some embodiments, the CRISPR nuclease comprises a sequence having at least 90% identity to the amino acid sequence set forth in SEQ ID NO: 32, and at least one RNA molecule comprises a sequence selected from the group consisting of SEQ ID NOs: 561-575.

[0154] In some embodiments, the CRISPR nuclease comprises a sequence having at least 90% identity to the amino acid sequence set forth in SEQ ID NO: 32 and at least one RNA molecule is a CRISPR RNA (crRNA) molecule comprising a guide sequence portion and a sequence selected from the group consisting of SEQ ID NOs: 561-564

[0155] In some embodiments, the composition further comprises a transactivating CRISPR RNA (tracrRNA) molecule comprising a sequence set forth in the group consisting of SEQ ID NOs: 565-574.

[0156] In some embodiments, the CRISPR nuclease comprises a sequence having at least 90% identity to the amino acid sequence set forth in SEQ ID NO: 32 and at least one RNA molecule is a single-guide RNA (sgRNA) molecule comprising a guide sequence portion and a sequence selected from the group consisting of SEQ ID NOs: 561-575.

[0157] In some embodiments, the CRISPR nuclease comprises a sequence having at least 90% identity to the amino acid sequence set forth in SEQ ID NO: 33 and at least one RNA molecule comprises a sequence selected from the group consisting of SEQ ID NOs: 288-301 and 576-590.

[0158] In some embodiments, the CRISPR nuclease comprises a sequence having at least 90% identity to the amino acid sequence set forth in SEQ ID NO: 33 and at least one RNA molecule is a CRISPR RNA (crRNA) molecule comprising a guide sequence portion and a sequence selected from the group consisting of SEQ ID NOs: 288-291 and 576-579.

[0159] In some embodiments, the composition further comprises a transactivating CRISPR RNA (tracrRNA) molecule comprising a sequence set forth in the group consisting of SEQ ID NOs: 292-298, 301, 580-586, and 590.

[0160] In some embodiments, the CRISPR nuclease comprises a sequence having at least 90% identity to the amino acid sequence set forth in SEQ ID NO: 33 and at least one RNA molecule is a single-guide RNA (sgRNA) molecule comprising a guide sequence portion and a sequence selected from the group consisting of SEQ ID NOs: 288-301 and 576-590.

[0161] In some embodiments, the CRISPR nuclease comprises a sequence having at least 90% identity to the amino acid sequence set forth in SEQ ID NO: 34 and at least one RNA molecule comprises a sequence selected from the group consisting of SEQ ID NOs: 591-599, UUACAAGGU, and ACAAGGU.

[0162] In some embodiments, the CRISPR nuclease comprises a sequence having at least 90% identity to the amino acid sequence set forth in SEQ ID NO: 34 and at least one RNA molecule is a CRISPR RNA (crRNA) molecule comprising a guide sequence portion and a sequence selected from the group consisting of SEQ ID NOs: 591 and 592.

[0163] In some embodiments, the composition further comprises a transactivating CRISPR RNA (tracrRNA) molecule comprising a sequence set forth in the group consisting of SEQ ID NOs: 593-596, 599, UUACAAGGU, and ACAAGGU.

[0164] In some embodiments, the CRISPR nuclease comprises a sequence having at least 90% identity to the amino acid sequence set forth in SEQ ID NO: 34 and at least one RNA molecule is a single-guide RNA (sgRNA) molecule comprising a guide sequence portion and a sequence selected from the group consisting of SEQ ID NOs: 591-599, UUACAAGGU, and ACAAGGU.

[0165] In some embodiments, the CRISPR nuclease comprises a sequence having at least 90% identity to the amino acid sequence set forth in SEQ ID NO: 35 and at least one RNA molecule comprises a sequence selected from the group consisting of SEQ ID NOs: 381-395, 600-614, 679-695, CGUUCAAAU, and UUAAAGUAA.

[0166] In some embodiments, the CRISPR nuclease comprises a sequence having at least 90% identity to the amino acid sequence set forth in SEQ ID NO: 35 and at least one RNA molecule is a CRISPR RNA (crRNA) molecule comprising a guide sequence portion and a sequence selected from the group consisting of SEQ ID NOs: 381-384, 600-603, 679-682, and 691-694.

[0167] In some embodiments, the composition further comprises a transactivating CRISPR RNA (tracrRNA) molecule comprising a sequence set forth in the group consisting of SEQ ID NOs: 385-392, 395, 604-611, 614, 683-688, 695, UUAAAGUAA, and CGUUCAAAU.

[0168] In some embodiments, the CRISPR nuclease comprises a sequence having at least 90% identity to the amino acid sequence set forth in SEQ ID NO: 35 and at least one RNA molecule is a single-guide RNA (sgRNA) molecule comprising a guide sequence portion and a sequence selected from the group consisting of SEQ ID NOs: 381-395, 600-614, 679-695, CGUUCAAAU, and UUAAAGUAA.

[0169] In some embodiments, the CRISPR nuclease comprises a sequence having at least 90% identity to the amino acid sequence set forth in SEQ ID NO: 36, and at least one RNA molecule comprises a sequence selected from the group consisting of SEQ ID NOs: 615-631.

[0170] In some embodiments, the CRISPR nuclease comprises a sequence having at least 90% identity to the amino acid sequence set forth in SEQ ID NO: 36 and at least one RNA molecule is a CRISPR RNA (crRNA) molecule comprising a guide sequence portion and a sequence selected from the group consisting of SEQ ID NOs: 615-618.

[0171] In some embodiments, the composition further comprises a transactivating CRISPR RNA (tracrRNA) molecule comprising a sequence set forth in the group consisting of SEQ ID NOs: 619-628 and 631.

[0172] In some embodiments, the CRISPR nuclease comprises a sequence having at least 90% identity to the amino acid sequence set forth in SEQ ID NO: 36 and at least one RNA molecule is a single-guide RNA (sgRNA) molecule comprising a guide sequence portion and a sequence selected from the group consisting of SEQ ID NOs: 615-631.

[0173] In some embodiments, the CRISPR nuclease comprises a sequence having at least 90% identity to the amino acid sequence set forth in SEQ ID NO: 37, and at least one RNA molecule comprises a sequence selected from the group consisting of SEQ ID NOs: 632-646.

[0174] In some embodiments, the CRISPR nuclease comprises a sequence having at least 90% identity to the amino acid sequence set forth in SEQ ID NO: 37 and at least one RNA molecule is a CRISPR RNA (crRNA) molecule comprising a guide sequence portion and a sequence selected from the group consisting of SEQ ID NOs: 632-635.

[0175] In some embodiments, the composition further comprises a transactivating CRISPR RNA (tracrRNA) molecule comprising a sequence set forth in the group consisting of SEQ ID NOs: 636-643 and 646.

[0176] In some embodiments, the CRISPR nuclease comprises a sequence having at least 90% identity to the amino acid sequence set forth in SEQ ID NO: 37 and at least one RNA molecule is a single-guide RNA (sgRNA) molecule comprising a guide sequence portion and a sequence selected from the group consisting of SEQ ID NOs: 632-646.

[0177] In some embodiments, the CRISPR nuclease comprises a sequence having at least 90% identity to the amino acid sequence set forth in SEQ ID NO: 38, and at least one RNA molecule comprises a sequence selected from the group consisting of SEQ ID NOs: 647-665.

[0178] In some embodiments, the CRISPR nuclease comprises a sequence having at least 90% identity to the amino acid sequence set forth in SEQ ID NO: 38 and at least one RNA molecule is a CRISPR RNA (crRNA) molecule comprising a guide sequence portion and a sequence selected from the group consisting of SEQ ID NOs: 647-650 and 662-665.

[0179] In some embodiments, the composition further comprises a transactivating CRISPR RNA (tracrRNA) molecule comprising a sequence set forth in the group consisting of SEQ ID NOs: 651-659.

[0180] In some embodiments, the CRISPR nuclease comprises a sequence having at least 90% identity to the amino acid sequence set forth in SEQ ID NO: 38 and at least one RNA molecule is a single-guide RNA (sgRNA) molecule comprising a guide sequence portion and a sequence selected from the group consisting of SEQ ID NOs: 647-665.

[0181] In some embodiments, the CRISPR nuclease comprises a sequence having at least 90% identity to the amino acid sequence set forth in SEQ ID NO: 39, and at least one RNA molecule comprises a sequence selected from the group consisting of SEQ ID NOs: 666-678.

[0182] In some embodiments, the CRISPR nuclease comprises a sequence having at least 90% identity to the amino acid sequence set forth in SEQ ID NO: 39 and at least one RNA molecule is a CRISPR RNA (crRNA) molecule comprising a guide sequence portion and a sequence selected from the group consisting of SEQ ID NOs: 666-669.

[0183] In some embodiments, the composition further comprises a transactivating CRISPR RNA (tracrRNA) molecule comprising a sequence set forth in the group consisting of SEQ ID NOs: 670-677.

[0184] In some embodiments, the CRISPR nuclease comprises a sequence having at least 90% identity to the amino acid sequence set forth in SEQ ID NO: 39 and at least one RNA molecule is a single-guide RNA (sgRNA) molecule comprising a guide sequence portion and a sequence selected from the group consisting of SEQ ID NOs: 666-678.

[0185] In some embodiments, the CRISPR nuclease is a nickase having an inactivated RuvC domain created by an amino acid substitution at a position provided for the CRISPR nuclease in column 5 of Table 1.

[0186] In some embodiments, the CRISPR nuclease is a nickase having an inactivated HNH domain created by an amino acid substitution at a position provided for the CRISPR nuclease in column 6 of Table 1.

[0187] In some embodiments, the CRISPR nuclease is a catalytically dead nuclease having an inactivated RuvC domain and an inactivated HNH domain created by substitutions at the positions provided for the CRISPR nuclease in column 7 of Table 1.

[0188] For example, a nickase may be generated for the OMNI-90 nuclease by inactivating its RuvC domain by substituting an aspartic acid residue (D) in position 11 of the amino acid sequence of OMNI-90 (SEQ ID NO: 1) for another amino acid e.g. alanine (A). Substitution to any other amino acid is permissible for each of the amino acid positions indicated in columns 5-7 of Table 1, except if the amino acid position is followed by an asterisk, which indicates that any substitution other than aspartic acid (D) to glutamic acid (E) or glutamic acid (E) or aspartic acid (D) results in inactivation. For example, a nickase may be generated for the OMNI-90 nuclease by inactivating its HNH domain by substituting an glutamic acid residue (E) in position 596 of the amino acid sequence of OMNI-90 (SEQ ID NO: 1) for an amino acid other than aspartic acid (D), e.g. for alanine (A). Other nickases or catalytically dead nucleases can be generated using the same notation in Table 1.

[0189] In some embodiments, the CRISPR nuclease utilizes a protospacer adjacent motif (PAM) sequence provided for the CRISPR nuclease in column 2 or column 3 of Table 3.

[0190] The invention also provides a method for modifying a nucleotide sequence at a DNA target site in a cell-free system or the genome of a cell comprising introducing into the cell any one of the compositions described above. In some embodiments, the composition comprises a CRISPR nuclease and a crRNA:tracrRNA complex or a sgRNA molecule.

[0191] In some embodiments, the CRISPR nuclease effects a DNA break in a DNA strand adjacent to a protospacer adjacent motif (PAM) sequence provided for the CRISPR nuclease in column 2 or column 3 of Table 3, and effects a DNA break in a DNA strand adjacent to a sequence that is complementary to the PAM sequence. For example, the OMNI-90 nuclease with the appropriate targeting sgRNA or crRNA:tracrRNA complex is capable of forming a DNA break in strand adjacent to a NNVTDNNN or NNATWBNN sequence and in a DNA strand adjacent to a sequence that is complementary to a NNVTDNNN or NNATWBNN sequence. In some embodiments, the DNA strand is within a nucleus of a cell.

[0192] In some embodiments, the CRISPR nuclease is a nickase having an inactivated RuvC domain created by an amino acid substitution at a position provided for the CRISPR nuclease in column 5 of Table 1, and effects a DNA break in a DNA strand adjacent to a sequence that is complementary to the PAM sequence.

[0193] In some embodiments, the CRISPR nuclease is a nickase having an inactivated HNH domain created by an amino acid substitution at a position provided for the CRISPR nuclease in column 6 of Table 1, and effects a DNA break in a DNA strand adjacent to the PAM sequence.

[0194] In some embodiments, the CRISPR nuclease is a catalytically dead nuclease having an inactivated RuvC domain and an inactivated HNH domain created by substitutions at the positions provided for the CRISPR nuclease in column 7 of Table 1, and effects a DNA break in a DNA strand adjacent to the PAM sequence.

[0195] In some embodiments, the cell is a eukaryotic cell or a prokaryotic cell.

[0196] In some embodiments, the cell is a mammalian cell.

[0197] In some embodiments, the cell is a human cell.

[0198] In some embodiments, the CRISPR nuclease comprises an amino acid sequence having at least 100%, 99%, 98%, 97%, 96%, 95%, 94%, 93%, 92%, 91%, 90%, 89%, 88%, 87%, 86%, 85%, 84%, 83%, or 82% amino acid sequence identity to a CRISPR nuclease as set forth in any of SEQ ID NOs: 1-11 and 13-39. In an embodiment the sequence encoding the CRISPR nuclease has at least 95% identity to a nucleic acid sequence selected from the group consisting of SEQ ID NOs: 40-50, 52-89, and 91-117.

[0199] The invention also provides a non-naturally occurring composition comprising a CRISPR nuclease, wherein the CRISPR nuclease comprises an amino acid sequence corresponding to the amino acid sequence of at least one of Domain A, Domain B, Domain C, Domain D, Domain E, Domain F, Domain G, Domain H, Domain I, or Domain J of a CRISPR nuclease, wherein each domain sequence has at least 90%, 91%, 92%, 93%, 94%, 95%, 96%, 97%, 98%, 99%, or 100% identity to the amino acids identified for the domain in Supplemental Table 1.

[0200] For example, a non-naturally occurring composition comprising a CRISPR nuclease, wherein the CRISPR nuclease comprises an amino acid sequence corresponding to the amino acid sequence of at least one of Domain A, Domain B, Domain C, Domain D, Domain E, Domain F, Domain G, Domain H, Domain I, or Domain J of SEQ ID NO: 2,
[0201] a) wherein Domain A comprises a sequence having at least 90%, 91%, 92%, 93%, 94%, 95%, 96%, 97%, 98%, 99%, or 100% identity to amino acids 1-40 of SEQ ID NO: 2;
[0202] b) wherein Domain B comprises a sequence having at least 90%, 91%, 92%, 93%, 94%, 95%, 96%, 97%, 98%, 99%, or 100% identity to amino acids 41-84 of SEQ ID NO: 2;
[0203] c) wherein Domain C comprises a sequence having at least 90%, 91%, 92%, 93%, 94%, 95%, 96%, 97%, 98%, 99%, or 100% identity to amino acids 85-129 of SEQ ID NO: 2;
[0204] d) wherein Domain D comprises a sequence having at least 90%, 91%, 92%, 93%, 94%, 95%, 96%, 97%, 98%, 99%, or 100% identity to amino acids 130-142 of SEQ ID NO: 2;
[0205] e) wherein Domain E comprises a sequence having at least 90%, 91%, 92%, 93%, 94%, 95%, 96%, 97%, 98%, 99%, or 100% identity to amino acids 143-251 of SEQ ID NO: 2;
[0206] f) wherein Domain F comprises a sequence having at least 90%, 91%, 92%, 93%, 94%, 95%, 96%, 97%, 98%, 99%, or 100% identity to amino acids 252-463 of SEQ ID NO: 2;
[0207] g) wherein Domain G comprises a sequence having at least 90%, 91%, 92%, 93%, 94%, 95%, 96%, 97%, 98%, 99%, or 100% identity to amino acids 464-511 of SEQ ID NO: 2;
[0208] h) wherein Domain H comprises a sequence having at least 90%, 91%, 92%, 93%, 94%, 95%, 96%, 97%, 98%, 99%, or 100% identity to amino acids 512-656 of SEQ ID NO: 2;
[0209] i) wherein Domain I comprises a sequence having at least 90%, 91%, 92%, 93%, 94%, 95%, 96%, 97%, 98%, 99%, or 100% identity to amino acids 657-830 of SEQ ID NO: 2; and
[0210] j) wherein Domain J comprises a sequence having at least 90%, 91%, 92%, 93%, 94%, 95%, 96%, 97%, 98%, 99%, or 100% identity to amino acids 831-1084 of SEQ ID NO: 2.

[0211] Accordingly, Supplemental Table 1 may be used to identify the domains which may be included in such a CRISPR nuclease.

[0212] According to some aspects of the invention, the disclosed compositions comprise DNA constructs or a vector system comprising nucleotide sequences that encode the CRISPR nuclease or variant CRISPR nuclease. In some embodiments, the nucleotide sequence that encode the CRISPR nuclease or variant CRISPR nuclease is operably linked to a promoter that is operable in the cells of interest. In some embodiments, the cell of interest is a eukaryotic cell. In some embodiments the cell of interest is a mammalian cell. In some embodiments, the nucleic acid sequence encoding the engineered CRISPR nuclease is codon optimized for use in cells from a particular organism. In some embodiments, the nucleic acid sequence encoding the nuclease is codon optimized for E. coli. In some embodiments, the nucleic acid sequence encoding the nuclease is codon optimized for eukaryotic cells. In some embodiments, the nucleic acid sequence encoding the nuclease is codon optimized for mammalian cells.

[0213] In some embodiments, the composition comprises a recombinant nucleic acid, comprising a heterologous promoter operably linked to a polynucleotide encoding a CRISPR enzyme having at least 100%, 99%, 98%, 97%, 96%, 95%, 94%, 93%, 92%, 91%, 90% identity to any of SEQ ID NOs: 1-11 and 13-39. Each possibility represents a separate embodiment.

[0214] In an embodiment of the composition, the CRISPR nuclease has at least 75%, 80%, 85, 90%, 95%, or 97% identity to the amino acid sequence as set forth in SEQ ID NO: 1 or the sequence encoding the CRISPR nuclease has at least a 75%, 80%, 85, 90%, 95%, or 97% sequence identity to a nucleotide sequence selected from the group consisting of SEQ ID NOs: 40 and 79.

[0215] In an embodiment of the composition, the CRISPR nuclease has at least 75%, 80%, 85, 90%, 95%, or 97% identity to the amino acid sequence as set forth in SEQ ID NO: 2 or the sequence encoding the CRISPR nuclease has at least a 75%, 80%, 85, 90%, 95%, or 97% sequence identity to a nucleotide sequence selected from the group consisting of SEQ ID NOs: 41 and 80.

[0216] In an embodiment of the composition, the CRISPR nuclease has at least 75%, 80%, 85, 90%, 95%, or 97% identity to the amino acid sequence as set forth in SEQ ID NO: 3 or the sequence encoding the CRISPR nuclease has at least a 75%, 80%, 85, 90%, 95%, or 97% sequence identity to a nucleotide sequence selected from the group consisting of SEQ ID NOs: 42 and 81.

[0217] In an embodiment of the composition, the CRISPR nuclease has at least 75%, 80%, 85, 90%, 95%, or 97% identity to the amino acid sequence as set forth in SEQ ID NO: 4 or the sequence encoding the CRISPR nuclease has at least a 75%, 80%, 85, 90%, 95%, or 97% sequence identity to a nucleotide sequence selected from the group consisting of SEQ ID NOs: 43 and 82.

[0218] In an embodiment of the composition, the CRISPR nuclease has at least 75%, 80%, 85, 90%, 95%, or 97% identity to the amino acid sequence as set forth in SEQ ID NO: 5 or the sequence encoding the CRISPR nuclease has at least a 75%, 80%, 85, 90%, 95%, or 97% sequence identity to a nucleotide sequence selected from the group consisting of SEQ ID NOs: 44 and 83.

[0219] In an embodiment of the composition, the CRISPR nuclease has at least 75%, 80%, 85, 90%, 95%, or 97% identity to the amino acid sequence as set forth in SEQ ID NO: 6 or the sequence encoding the CRISPR nuclease has at least a 75%, 80%, 85, 90%, 95%, or 97% sequence identity to a nucleotide sequence selected from the group consisting of SEQ ID NOs: 45 and 84.

[0220] In an embodiment of the composition, the CRISPR nuclease has at least 75%, 80%, 85, 90%, 95%, or 97% identity to the amino acid sequence as set forth in SEQ ID NO: 7 or the sequence encoding the CRISPR nuclease has at least a 75%, 80%, 85, 90%, 95%, or 97% sequence identity to a nucleotide sequence selected from the group consisting of SEQ ID NOs: 46 and 85.

[0221] In an embodiment of the composition, the CRISPR nuclease has at least 75%, 80%, 85, 90%, 95%, or 97% identity to the amino acid sequence as set forth in SEQ ID NO: 8 or the sequence encoding the CRISPR nuclease has at least a 75%, 80%, 85, 90%, 95%, or 97% sequence identity to a nucleotide sequence selected from the group consisting of SEQ ID NOs: 47 and 86.

[0222] In an embodiment of the composition, the CRISPR nuclease has at least 75%, 80%, 85, 90%, 95%, or 97% identity to the amino acid sequence as set forth in SEQ ID NO: 9 or the sequence encoding the CRISPR nuclease has at least a 75%, 80%, 85, 90%, 95%, or 97% sequence identity to a nucleotide sequence selected from the group consisting of SEQ ID NOs: 48 and 87.

[0223] In an embodiment of the composition, the CRISPR nuclease has at least 75%, 80%, 85, 90%, 95%, or 97% identity to the amino acid sequence as set forth in SEQ ID NO: 10 or the sequence encoding the CRISPR nuclease has at least a 75%, 80%, 85, 90%, 95%, or 97% sequence identity to a nucleotide sequence selected from the group consisting of SEQ ID NOs: 49 and 88.

[0224] In an embodiment of the composition, the CRISPR nuclease has at least 75%, 80%, 85, 90%, 95%, or 97% identity to the amino acid sequence as set forth in SEQ ID NO: 11 or the sequence encoding the CRISPR nuclease has at least a 75%, 80%, 85, 90%, 95%, or 97% sequence identity to a nucleotide sequence selected from the group consisting of SEQ ID NOs: 50 and 89.

[0225] In an embodiment of the composition, the CRISPR nuclease has at least 75%, 80%, 85, 90%, 95%, or 97% identity to the amino acid sequence as set forth in SEQ ID NO: 13 or the sequence encoding the CRISPR nuclease has at least a 75%, 80%, 85, 90%, 95%, or 97% sequence identity to a nucleotide sequence selected from the group consisting of SEQ ID NOs: 52 and 91.

[0226] In an embodiment of the composition, the CRISPR nuclease has at least 75%, 80%, 85, 90%, 95%, or 97% identity to the amino acid sequence as set forth in SEQ ID NO: 14 or the sequence encoding the CRISPR nuclease has at least a 75%, 80%, 85, 90%, 95%, or 97% sequence identity to a nucleotide sequence selected from the group consisting of SEQ ID NOs: 53 and 92.

[0227] In an embodiment of the composition, the CRISPR nuclease has at least 75%, 80%, 85, 90%, 95%, or 97% identity to the amino acid sequence as set forth in SEQ ID NO: 15 or the sequence encoding the CRISPR nuclease has at least a 75%, 80%, 85, 90%, 95%, or 97% sequence identity to a nucleotide sequence selected from the group consisting of SEQ ID NOs: 54 and 93.

[0228] In an embodiment of the composition, the CRISPR nuclease has at least 75%, 80%, 85, 90%, 95%, or 97% identity to the amino acid sequence as set forth in SEQ ID NO: 16 or the sequence encoding the CRISPR nuclease has at least a 75%, 80%, 85, 90%, 95%, or 97% sequence identity to a nucleotide sequence selected from the group consisting of SEQ ID NOs: 55 and 94.

[0229] In an embodiment of the composition, the CRISPR nuclease has at least 75%, 80%, 85, 90%, 95%, or 97% identity to the amino acid sequence as set forth in SEQ ID NO: 17 or the sequence encoding the CRISPR nuclease has at least a 75%, 80%, 85, 90%, 95%, or 97% sequence identity to a nucleotide sequence selected from the group consisting of SEQ ID NOs: 56 and 95.

[0230] In an embodiment of the composition, the CRISPR nuclease has at least 75%, 80%, 85, 90%, 95%, or 97% identity to the amino acid sequence as set forth in SEQ ID NO: 18 or the sequence encoding the CRISPR nuclease has at least a 75%, 80%, 85, 90%, 95%, or 97% sequence identity to a nucleotide sequence selected from the group consisting of SEQ ID NOs: 57 and 96.

[0231] In an embodiment of the composition, the CRISPR nuclease has at least 75%, 80%, 85, 90%, 95%, or 97% identity to the amino acid sequence as set forth in SEQ ID NO: 19 or the sequence encoding the CRISPR nuclease has at least a 75%, 80%, 85, 90%, 95%, or 97% sequence identity to a nucleotide sequence selected from the group consisting of SEQ ID NOs: 58 and 97.

[0232] In an embodiment of the composition, the CRISPR nuclease has at least 75%, 80%, 85, 90%, 95%, or 97% identity to the amino acid sequence as set forth in SEQ ID NO: 20 or the sequence encoding the CRISPR nuclease has at least a 75%, 80%, 85, 90%, 95%, or 97% sequence identity to a nucleotide sequence selected from the group consisting of SEQ ID NOs: 59 and 98.

[0233] In an embodiment of the composition, the CRISPR nuclease has at least 75%, 80%, 85, 90%, 95%, or 97% identity to the amino acid sequence as set forth in SEQ ID NO: 21 or the sequence encoding the CRISPR nuclease has at least a 75%, 80%, 85, 90%, 95%, or 97% sequence identity to a nucleotide sequence selected from the group consisting of SEQ ID NOs: 60 and 99.

[0234] In an embodiment of the composition, the CRISPR nuclease has at least 75%, 80%, 85, 90%, 95%, or 97% identity to the amino acid sequence as set forth in SEQ ID NO: 22 or the sequence encoding the CRISPR nuclease has at least a 75%, 80%, 85, 90%, 95%, or 97% sequence identity to a nucleotide sequence selected from the group consisting of SEQ ID NOs: 61 and 100.

[0235] In an embodiment of the composition, the CRISPR nuclease has at least 75%, 80%, 85, 90%, 95%, or 97% identity to the amino acid sequence as set forth in SEQ ID NO: 23 or the sequence encoding the CRISPR nuclease has at least a 75%, 80%, 85, 90%, 95%, or 97% sequence identity to a nucleotide sequence selected from the group consisting of SEQ ID NOs: 62 and 101.

[0236] In an embodiment of the composition, the CRISPR nuclease has at least 75%, 80%, 85, 90%, 95%, or 97% identity to the amino acid sequence as set forth in SEQ ID NO: 24 or the sequence encoding the CRISPR nuclease has at least a 75%, 80%, 85, 90%, 95%, or 97% sequence identity to a nucleotide sequence selected from the group consisting of SEQ ID NOs: 63 and 102.

[0237] In an embodiment of the composition, the CRISPR nuclease has at least 75%, 80%, 85, 90%, 95%, or 97% identity to the amino acid sequence as set forth in SEQ ID NO: 25 or the sequence encoding the CRISPR nuclease has at least a 75%, 80%, 85, 90%, 95%, or 97% sequence identity to a nucleotide sequence selected from the group consisting of SEQ ID NOs: 64 and 103.

[0238] In an embodiment of the composition, the CRISPR nuclease has at least 75%, 80%, 85, 90%, 95%, or 97% identity to the amino acid sequence as set forth in SEQ ID NO: 26 or the sequence encoding the CRISPR nuclease has at least a 75%, 80%, 85, 90%, 95%, or 97% sequence identity to a nucleotide sequence selected from the group consisting of SEQ ID NOs: 65 and 104.

[0239] In an embodiment of the composition, the CRISPR nuclease has at least 75%, 80%, 85, 90%, 95%, or 97% identity to the amino acid sequence as set forth in SEQ ID NO: 27 or the sequence encoding the CRISPR nuclease has at least a 75%, 80%, 85, 90%, 95%, or 97% sequence identity to a nucleotide sequence selected from the group consisting of SEQ ID NOs: 66 and 105.

[0240] In an embodiment of the composition, the CRISPR nuclease has at least 75%, 80%, 85, 90%, 95%, or 97% identity to the amino acid sequence as set forth in SEQ ID NO: 28 or the sequence encoding the CRISPR nuclease has at least a 75%, 80%, 85, 90%, 95%, or 97% sequence identity to a nucleotide sequence selected from the group consisting of SEQ ID NOs: 67 and 106.

[0241] In an embodiment of the composition, the CRISPR nuclease has at least 75%, 80%, 85, 90%, 95%, or 97% identity to the amino acid sequence as set forth in SEQ ID NO: 29 or the sequence encoding the CRISPR nuclease has at least a 75%, 80%, 85, 90%, 95%, or 97% sequence identity to a nucleotide sequence selected from the group consisting of SEQ ID NOs: 68 and 107.

[0242] In an embodiment of the composition, the CRISPR nuclease has at least 75%, 80%, 85, 90%, 95%, or 97% identity to the amino acid sequence as set forth in SEQ ID NO: 30 or the sequence encoding the CRISPR nuclease has at least a 75%, 80%, 85, 90%, 95%, or 97% sequence identity to a nucleotide sequence selected from the group consisting of SEQ ID NOs: 69 and 108.

[0243] In an embodiment of the composition, the CRISPR nuclease has at least 75%, 80%, 85, 90%, 95%, or 97% identity to the amino acid sequence as set forth in SEQ ID NO: 31 or the sequence encoding the CRISPR nuclease has at least a 75%, 80%, 85, 90%, 95%, or 97% sequence identity to a nucleotide sequence selected from the group consisting of SEQ ID NOs: 70 and 109.

[0244] In an embodiment of the composition, the CRISPR nuclease has at least 75%, 80%, 85, 90%, 95%, or 97% identity to the amino acid sequence as set forth in SEQ ID NO: 32 or the sequence encoding the CRISPR nuclease has at least a 75%, 80%, 85, 90%, 95%, or 97% sequence identity to a nucleotide sequence selected from the group consisting of SEQ ID NOs: 71 and 110.

[0245] In an embodiment of the composition, the CRISPR nuclease has at least 75%, 80%, 85, 90%, 95%, or 97% identity to the amino acid sequence as set forth in SEQ ID NO: 33 or the sequence encoding the CRISPR nuclease has at least a 75%, 80%, 85, 90%, 95%, or 97% sequence identity to a nucleotide sequence selected from the group consisting of SEQ ID NOs: 72 and 111.

[0246] In an embodiment of the composition, the CRISPR nuclease has at least 75%, 80%, 85, 90%, 95%, or 97% identity to the amino acid sequence as set forth in SEQ ID NO: 34 or the sequence encoding the CRISPR nuclease has at least a 75%, 80%, 85, 90%, 95%, or 97% sequence identity to a nucleotide sequence selected from the group consisting of SEQ ID NOs: 73 and 112.

[0247] In an embodiment of the composition, the CRISPR nuclease has at least 75%, 80%, 85, 90%, 95%, or 97% identity to the amino acid sequence as set forth in SEQ ID NO: 35 or the sequence encoding the CRISPR nuclease has at least a 75%, 80%, 85, 90%, 95%, or 97% sequence identity to a nucleotide sequence selected from the group consisting of SEQ ID NOs: 74 and 113.

[0248] In an embodiment of the composition, the CRISPR nuclease has at least 75%, 80%, 85, 90%, 95%, or 97% identity to the amino acid sequence as set forth in SEQ ID NO: 36 or the sequence encoding the CRISPR nuclease has at least a 75%, 80%, 85, 90%, 95%, or 97% sequence identity to a nucleotide sequence selected from the group consisting of SEQ ID NOs: 75 and 114.

[0249] In an embodiment of the composition, the CRISPR nuclease has at least 75%, 80%, 85, 90%, 95%, or 97% identity to the amino acid sequence as set forth in SEQ ID NO: 37 or the sequence encoding the CRISPR nuclease has at least a 75%, 80%, 85, 90%, 95%, or 97% sequence identity to a nucleotide sequence selected from the group consisting of SEQ ID NOs: 76 and 115.

[0250] In an embodiment of the composition, the CRISPR nuclease has at least 75%, 80%, 85, 90%, 95%, or 97% identity to the amino acid sequence as set forth in SEQ ID NO: 38 or the sequence encoding the CRISPR nuclease has at least a 75%, 80%, 85, 90%, 95%, or 97% sequence identity to a nucleotide sequence selected from the group consisting of SEQ ID NOs: 77 and 116.

[0251] In an embodiment of the composition, the CRISPR nuclease has at least 75%, 80%, 85, 90%, 95%, or 97% identity to the amino acid sequence as set forth in SEQ ID NO: 39 or the sequence encoding the CRISPR nuclease has at least a 75%, 80%, 85, 90%, 95%, or 97% sequence identity to a nucleotide sequence selected from the group consisting of SEQ ID NOs: 78 and 117.

[0252] According to some embodiments, there is provided an engineered or non-naturally occurring composition comprising a CRISPR nuclease comprising a sequence having at least 100%, 99%, 98%, 97%, 96%, 95%, 94%, 93%, 92%, 91%, 90%, 85%, 80% identity to the amino acid sequence selected from the group consisting of SEQ ID NOs: 1-11 and 13-39 or a nucleic acid molecule comprising a sequence encoding the CRISPR nuclease. Each possibility represents a separate embodiment.

In an embodiment, the CRISPR nuclease is engineered or non-naturally occurring. The CRISPR nuclease may also be recombinant. Such CRISPR nucleases are produced using laboratory methods (molecular cloning) to bring together genetic material from multiple sources, creating sequences that would not otherwise be found in biological organisms.

[0253] In an embodiment, the CRISPR nuclease of the invention exhibits increased specificity to a target site compared to a SpCas9 nuclease when complexed with the one or more RNA molecules.

[0254] In an embodiment, the complex of the CRISPR nuclease of the invention and one or more RNA molecules exhibits at least maintained on-target editing activity of the target site and reduced off-target activity compared to SpCas9 nuclease.

[0255] In an embodiment, the CRISPR nuclease further comprises an RNA-binding portion capable of interacting with a DNA-targeting RNA molecule (gRNA) and an activity portion that exhibits site-directed enzymatic activity.

[0256] In an embodiment, the composition further comprises a DNA-targeting RNA molecule or a DNA polynucleotide encoding a DNA-targeting RNA molecule, wherein the DNA-targeting RNA molecule comprises a guide sequence portion, i.e. a nucleotide sequence that is complementary to a sequence in a target region, wherein the DNA-targeting RNA molecule and the CRISPR nuclease do not naturally occur together.

[0257] In an embodiment, the DNA-targeting RNA molecule further comprises a nucleotide sequence that can form a complex with a CRISPR nuclease.

[0258] This invention also provides a non-naturally occurring composition comprising a CRISPR associated system comprising:
[0259] a) one or more RNA molecules comprising a guide sequence portion linked to a direct repeat sequence, wherein the guide sequence is capable of hybridizing with a target sequence, or one or more nucleotide sequences encoding the one or more RNA molecules; and
[0260] b) a CRISPR nuclease comprising an amino acid sequence having at least 95% identity to the amino acid sequence selected from the group consisting of SEQ ID NOs: 1-11 and 13-39 or a nucleic acid molecule comprising a sequence encoding the CRISPR nuclease;
   [0261] wherein the one or more RNA molecules hybridize to the target sequence, wherein the target sequence is 3′ of a Protospacer Adjacent Motif (PAM), and the one or more RNA molecules form a complex with the RNA-guided nuclease.

[0262] In an embodiment, the composition further comprises an RNA molecule comprising a nucleotide sequence that can form a complex with a CRISPR nuclease (e.g. a tracrRNA molecule) or a DNA polynucleotide comprising a sequence encoding an RNA molecule that can form a complex with the CRISPR nuclease.

[0263] In an embodiment, the composition further comprises a donor template for homology directed repair (HDR).

[0264] In an embodiment, the composition is capable of editing the target region in the genome of a cell.

[0265] According to some embodiments, there is provided a non-naturally occurring composition comprising:
[0266] (a) a CRISPR nuclease, or a polynucleotide encoding the CRISPR nuclease, comprising:
   [0267] an RNA-binding portion; and
   [0268] an activity portion that exhibits site-directed enzymatic activity, wherein the CRISPR nuclease has at least 100%, 99%, 98%, 97%, 96%, 95%, 94%, 93%, 92%, 91%, 90%, 85%, 80% identity to any of SEQ ID NOs: 1-11 and 13-39; and
[0269] (b) one or more RNA molecules or a DNA polynucleotide encoding the one or more RNA molecules comprising:
   [0270] i) a DNA-targeting RNA sequence, comprising a nucleotide sequence that is complementary to a sequence in a target DNA sequence; and
   [0271] ii) a protein-binding RNA sequence, capable of interacting with the RNA-binding portion of the CRISPR nuclease,
[0272] wherein the DNA targeting RNA sequence and the CRISPR nuclease do not naturally occur together. Each possibility represents a separate embodiment.

[0273] In some embodiments, there is provided a single RNA molecule comprising the DNA-targeting RNA sequence and the protein-binding RNA sequence, wherein the RNA molecule can form a complex with the CRISPR nuclease and serve as the DNA targeting module. In some embodiments, the RNA molecule has a length of up to 1000 bases, 900 bases, 800 bases, 700 bases, 600 bases, 500 bases, 400 bases, 300 bases, 200 bases, 100 bases, 50 bases. Each possibility represents a separate embodiment. In some embodiments, a first RNA molecule comprising the DNA-targeting RNA sequence and a second RNA molecule comprising the protein-binding RNA sequence interact by base pairing or alternatively fused together to form one or more RNA molecules that complex with the CRISPR nuclease and serve as the DNA targeting module.

[0274] This invention also provides a non-naturally occurring composition comprising:
[0275] a) a CRISPR nuclease comprising a sequence having at least 95% identity to the amino acid sequence selected from the group consisting of SEQ ID NOs: 1-11 and 13-39 or a nucleic acid molecule comprising a sequence encoding the CRISPR nuclease; and
[0276] b) one or more RNA molecules, or one or more DNA polynucleotide encoding the one or more RNA molecules, comprising at least one of:
   [0277] i) a nuclease-binding RNA nucleotide sequence capable of interacting with/binding to the CRISPR nuclease; and
   [0278] ii) a DNA-targeting RNA nucleotide sequence comprising a sequence complementary to a sequence in a target DNA sequence,
[0279] wherein the CRISPR nuclease is capable of complexing with the one or more RNA molecules to form a complex capable of hybridizing with the target DNA sequence.

[0280] In an embodiment, the CRISPR nuclease and the one or more RNA molecules form a CRISPR complex that is capable of binding to the target DNA sequence to effect cleavage of the target DNA sequence.

[0281] In an embodiment, the CRISPR nuclease and at least one of the one or more RNA molecules do not naturally occur together.

[0282] In an embodiment:
[0283] a) the CRISPR nuclease comprises an RNA-binding portion and an activity portion that exhibits site-directed enzymatic activity;
[0284] b) the DNA-targeting RNA nucleotide sequence comprises a nucleotide sequence that is complementary to a sequence in a target DNA sequence; and
[0285] c) the nuclease-binding RNA nucleotide sequence comprises a sequence that interacts with the RNA-binding portion of the CRISPR nuclease.

[0286] In an embodiment, the nuclease-binding RNA nucleotide sequence and the DNA-targeting RNA nucleotide sequence are on a single guide RNA molecule (sgRNA), wherein the sgRNA molecule can form a complex with the CRISPR nuclease and serve as the DNA targeting module.

[0287] In an embodiment, the nuclease-binding RNA nucleotide sequence is on a first RNA molecule and the DNA-targeting RNA nucleotide sequence is on a second RNA molecule, and wherein the first and second RNA molecules interact by base-pairing or are fused together to form a RNA complex or sgRNA that forms a complex with the CRISPR nuclease and serves as a DNA targeting module.

[0288] In an embodiment, the sgRNA has a length of up to 1000 bases, 900 bases, 800 bases, 700 bases, 600 bases, 500 bases, 400 bases, 300 bases, 200 bases, 100 bases, 50 bases.

[0289] In an embodiment, the composition further comprises a donor template for homology directed repair (HDR).

[0290] In an embodiment, the CRISPR nuclease is non-naturally occurring.

[0291] In an embodiment, the CRISPR nuclease is engineered and comprises unnatural or synthetic amino acids.

[0292] In an embodiment, the CRISPR nuclease is engineered and comprises one or more of a nuclear localization sequences (NLS), cell penetrating peptide sequences, and/or affinity tags.

[0293] In an embodiment, the CRISPR nuclease comprises one or more nuclear localization sequences of sufficient strength to drive accumulation of a CRISPR complex comprising the CRISPR nuclease in a detectable amount in the nucleus of a eukaryotic cell.

[0294] This invention also provides a method of modifying a nucleotide sequence at a target site in a cell-free system or the genome of a cell comprising introducing into the cell any of the compositions of the invention.

[0295] In an embodiment, the cell is a eukaryotic cell.

[0296] In another embodiment, the cell is a prokaryotic cell.

[0297] In some embodiments, the one or more RNA molecules further comprises an RNA sequence comprising a nucleotide molecule that can form a complex with the RNA nuclease (tracrRNA) or a DNA polynucleotide encoding an RNA molecule comprising a nucleotide sequence that can form a complex with the CRISPR nuclease.

[0298] In an embodiment, the CRISPR nuclease comprises 1, 2, 3, 4, 5, 6, 7, 8, 9, 10, or more NLSs at or near the amino-terminus, 1, 2, 3, 4, 5, 6, 7, 8, 9, 10, or more NLSs at or near carboxy-terminus, or a combination of 1, 2, 3, 4, 5, 6, 7, 8, 9, 10, or more NLSs at or near the amino-terminus and 1, 2, 3, 4, 5, 6, 7, 8, 9, 10, or more NLSs at or near carboxy-terminus. In an embodiment 1-4 NLSs are fused with the CRISPR nuclease. In an embodiment, an NLS is located within the open-reading frame (ORF) of the CRISPR nuclease.

[0299] Methods of fusing an NLS at or near the amino-terminus, at or near carboxy-terminus, or within the ORF of an expressed protein are well known in the art. As an example, to fuse an NLS to the amino-terminus of a CRISPR nuclease, the nucleic acid sequence of the NLS is placed immediately after the start codon of the CRISPR nuclease on the nucleic acid encoding the NLS-fused CRISPR nuclease. Conversely, to fuse an NLS to the carboxy-terminus of a CRISPR nuclease the nucleic acid sequence of the NLS is placed after the codon encoding the last amino acid of the CRISPR nuclease and before the stop codon.

[0300] Any combination of NLSs, cell penetrating peptide sequences, and/or affinity tags at any position along the ORF of the CRISPR nuclease is contemplated in this invention.

[0301] The amino acid sequences and nucleic acid sequences of the CRISPR nucleases provided herein may include NLS and/or TAGs inserted so as to interrupt the contiguous amino acid or nucleic acid sequences of the CRISPR nucleases.

[0302] In an embodiment, the one or more NLSs are in tandem repeats.

[0303] In an embodiment, the one or more NLSs are considered in proximity to the N- or C-terminus when the nearest amino acid of the NLS is within about 1, 2, 3, 4, 5, 10, 15, 20, 25, 30, 40, 50, or more amino acids along the polypeptide chain from the N- or C-terminus.

[0304] As discussed, the CRISPR nuclease may be engineered to comprise one or more of a nuclear localization sequences (NLS), cell penetrating peptide sequences, and/or affinity tags.

[0305] In an embodiment, the CRISPR nuclease exhibits increased specificity to a target site compared to the wild type of the CRISPR nuclease when complexed with the one or more RNA molecules.

[0306] In an embodiment, the complex of the CRISPR nuclease and one or more RNA molecules exhibits at least maintained on-target editing activity of the target site and reduced off-target activity compared to the wild-type of the CRISPR nuclease.

[0307] In an embodiment, the composition further comprises a recombinant nucleic acid molecule comprising a heterologous promoter operably linked to the nucleotide acid molecule comprising the sequence encoding the CRISPR nuclease.

[0308] In an embodiment, the CRISPR nuclease or nucleic acid molecule comprising a sequence encoding the CRISPR nuclease is non-naturally occurring or engineered.

[0309] This invention also provides a non-naturally occurring or engineered composition comprising a vector system comprising the nucleic acid molecule comprising a sequence encoding any of the CRISPR nucleases of the invention.

[0310] This invention also provides use of any of the compositions of the invention for the treatment of a subject afflicted with a disease associated with a genomic mutation comprising modifying a nucleotide sequence at a target site in the genome of the subject.

[0311] This invention provides a method of modifying a nucleotide sequence at a target site in the genome of a mammalian cell comprising introducing into the cell (i) a composition comprising a CRISPR nuclease having at least 95% identity to an amino acid sequence selected from the group consisting of SEQ ID NOs: 1-11 and 13-39 or a nucleic acid molecule comprising a sequence encoding a CRISPR nuclease which sequence has at least 95% identity to a nucleic acid sequence selected from the group consisting of SEQ ID NOs: 40-50, 52-89, and 91-117 and (ii) a DNA-targeting RNA molecule, or a DNA polynucleotide encoding a DNA-targeting RNA molecule, comprising a nucleotide sequence that is complementary to a sequence in the target DNA.

[0312] In some embodiments, the method is performed ex vivo. In some embodiments, the method is performed in vivo. In some embodiments, some steps of the method are performed ex vivo and some steps are performed in vivo. In some embodiments the mammalian cell is a human cell.

[0313] In an embodiment, the method further comprises introducing into the cell: (iii) an RNA molecule comprising a tracrRNA sequence or a DNA polynucleotide encoding an RNA molecule comprising a tracrRNA sequence.

[0314] In an embodiment, the DNA-targeting RNA molecule comprises a crRNA repeat sequence.

[0315] In an embodiment, the RNA molecule comprising a tracrRNA sequence is able to bind the DNA-targeting RNA molecule.

[0316] In an embodiment, the DNA-targeting RNA molecule and the RNA molecule comprising a tracrRNA sequence interact to form an RNA complex, and the RNA complex is capable of forming an active complex with the CRISPR nuclease.

[0317] In an embodiment, the DNA-targeting RNA molecule and the RNA molecule comprising a nuclease-binding RNA sequence are fused in the form of a single guide RNA molecule that is suitable to form an active complex with the CRISPR nuclease.

[0318] In an embodiment, the guide sequence portion comprises a sequence complementary to a protospacer sequence.

[0319] In an embodiment, the CRISPR nuclease forms a complex with the DNA-targeting RNA molecule and effects a double strand break in a region that is 3′ or 5′ of a Protospacer Adjacent Motif (PAM).

[0320] In an embodiment of any of the methods described herein, the method is for treating a subject afflicted with a disease associated with a genomic mutation comprising modifying a nucleotide sequence at a target site in the genome of the subject.

[0321] In an embodiment, the method comprises first selecting a subject afflicted with a disease associated with a genomic mutation and obtaining the cell from the subject.

[0322] This invention also provides a modified cell or cells obtained by any of the methods described herein. In an embodiment these modified cell or cells are capable of giving rise to progeny cells. In an embodiment these modified cell or cells are capable of giving rise to progeny cells after engraftment.

[0323] This invention also provides a composition comprising these modified cells and a pharmaceutically acceptable carrier. Also provided is an in vitro or ex vivo method of preparing this, comprising mixing the cells with the pharmaceutically acceptable carrier.

[0324] This invention also provides a kit for modifying a nucleotide sequence at a DNA target site in a cell-free system or a genome of a cell comprising introducing into the system or cell a CRISPR nuclease having at least 95% sequence identity to the amino acid sequence selected from the group consisting of SEQ ID NOs: 1-11 and 13-39, one or more RNA molecules configured to form a complex with the CRISPR nuclease and/or target the complex to a target site, and instructions for delivering the RNA molecule and the CRISPR nuclease to the cell. For example, the kit may be used as a diagnostic kit to detect the presence of a target site (e.g. a DNA sequence) in a nucleotide molecule in a cell or in a test tube.

### DNA-Targeting RNA Molecules

[0325] The “guide sequence portion” of an RNA molecule refers to a nucleotide sequence that is capable of hybridizing to a specific target DNA sequence, e.g., the guide sequence portion has a nucleotide sequence which is partially or fully complementary to the DNA sequence being targeted along the length of the guide sequence portion. In some embodiments, the guide sequence portion is 17, 18, 19, 20, 21, 22, 23, 24, 25, 26, 27, 28, 29, 30, 31, 32, 33, 34, 35, 36, 37, 38, 39, 40, 41, 42, 43, 44, 45, 46, 47, 48, 49 or 50 nucleotides in length, or approximately 17-50, 17-49, 17-48, 17-47, 17-46, 17-45, 17-44, 17-43, 17-42, 17-41, 17-40, 17-39, 17-38, 17-37, 17-36, 17-35, 17-34, 17-33, 17-31, 17-30, 17-29, 17-28, 17-27, 17-26, 17-25, 17-24, 17-22, 17-21, 18-25, 18-24, 18-23, 18-22, 18-21, 19-25, 19-24, 19-23, 19-22, 19-21, 19-20, 20-22, 18-20, 20-21, 21-22, or 17-20 nucleotides in length. The entire length of the guide sequence portion is fully complementary to the DNA sequence being targeted along the length of the guide sequence portion. The guide sequence portion may be part of an RNA molecule that can form a complex with a CRISPR nuclease with the guide sequence portion serving as the DNA targeting portion of the CRISPR complex. When the DNA molecule having the guide sequence portion is present contemporaneously with the CRISPR molecule the RNA molecule is capable of targeting the CRISPR nuclease to the specific target DNA sequence. Each possibility represents a separate embodiment. An RNA molecule can be custom designed to target any desired sequence. Accordingly, a molecule comprising a “guide sequence portion” is a type of targeting molecule. Throughout this application, the terms “guide molecule,” “RNA guide molecule,” “guide RNA molecule,” and “gRNA molecule” are synonymous with a molecule comprising a guide sequence portion, and the term “spacer” is synonymous with a “guide sequence portion.

[0326] In embodiments of the present invention, the CRISPR nuclease has its greatest cleavage activity when used with an RNA molecule comprising a guide sequence portion having 17, 18, 19 20, 21, 22, 23, 24, 25, 26, 27, 28, 29, or 30 nucleotides.

[0327] A single-guide RNA (sgRNA) molecule may be used to direct a CRISPR nuclease to a desired target site. The single-guide RNA comprises a guide sequence portion as well as a scaffold portion. The scaffold portion interacts with a CRISPR nuclease and, together with a guide sequence portion, activates and targets the CRISPR nuclease to a desired target site. A scaffold portion may be further engineered, for example, to have a reduced size. For example, OMNI-103 CRISPR nuclease demonstrates on-target nuclease activity with a sgRNA molecule having an engineered scaffold portion that is only 79 nucleotides in length.

[0328] According to some aspects of the invention, the disclosed methods comprise a method of modifying a nucleotide sequence at a target site in a cell-free system or the genome of a cell comprising introducing into the cell the composition of any one of the embodiments described herein.

[0329] In some embodiments, the cell is a eukaryotic cell, preferably a mammalian cell or a plant cell.

[0330] According to some aspects of the invention, the disclosed methods comprise a use of any one of the compositions described herein for the treatment of a subject afflicted with a disease associated with a genomic mutation comprising modifying a nucleotide sequence at a target site in the genome of the subject.

[0331] According to some aspects of the invention, the disclosed methods comprise a method of treating subject having a mutation disorder comprising targeting any one of the compositions described herein to an allele associated with the mutation disorder.

[0332] In some embodiments, the mutation disorder is related to a disease or disorder selected from any of a neoplasia, age-related macular degeneration, schizophrenia, neurological, neurodegenerative, or movement disorder, Fragile X Syndrome, secretase-related disorders, prion-related disorders, ALS, addiction, autism, Alzheimer's Disease, neutropenia, inflammation-related disorders, Parkinson's Disease, blood and coagulation diseases and disorders, beta thalassemia, sickle cell anemia, cell dysregulation and oncology diseases and disorders, inflammation and immune-related diseases and disorders, metabolic, liver, kidney and protein diseases and disorders, muscular and skeletal diseases and disorders, dermatological diseases and disorders, neurological and neuronal diseases and disorders, and ocular diseases and disorders.

### OMNI CRISPR Nuclease Domains

[0333] The characteristic targeted nuclease activity of a CRISPR nuclease is imparted by the various functions of its specific domains. In this application the OMNI CRISPR nuclease domains are defined as Domain A, Domain B, Domain C, Domain D, Domain E, Domain F, Domain G, Domain H, Domain I, and Domain J.

[0334] The activity of each OMNI CRISPR nuclease domain is described herein, with each domain activity providing aspects of the advantageous features of the nuclease.

[0335] Specifically, Domain A, Domain G, and Domain I form a structural unit of the OMNI CRISPR nuclease, which contains a nuclease active site that participates in DNA strand cleavage. The structural unit formed by Domain A, Domain G, and Domain I cleaves a DNA strand that is displaced by a guide RNA molecule binding at a double-stranded DNA target site.

[0336] Domain B is involved in initiating DNA cleavage activity upon the binding of the OMNI CRISPR nuclease to a target a DNA site.

[0337] Domain C, Domain D, Domain E, and Domain F bind a guide RNA molecule and participate in providing specificity for target site recognition.

[0338] Domain H contains a nuclease active site that participates in DNA strand cleavage. Domain H cleaves a DNA strand which a guide RNA molecule binds at a DNA target site.

[0339] Domain J is involved in providing PAM site specificity to the OMNI CRISPR nuclease, including aspects of PAM site interrogation and recognition. Domain J also performs topoisomerase activity.

[0340] Further description of other CRISPR nuclease domains and their general functions can be found in, inter alia, Mir et al., ACS Chem. Biol. (2019), Palermo et al., Quarterly Reviews of Biophysics (2018), Jiang and Doudna, Annual Review of Biophysics (2017), Nishimasu et al., Cell (2014) and Nishimasu et al., Cell (2015), incorporated herein by reference.

[0341] In one aspect of the invention, an amino acid sequence having similarity to an OMNI CRISPR nuclease domain may be utilized in the design and manufacture of a non-naturally occurring peptide, e.g. a CRISPR nuclease, such that the peptide displays the advantageous features of the OMNI CRISPR nuclease domain activity.

[0342] In an embodiment, such a peptide, e.g. a CRISPR nuclease, comprises an amino acid sequence that has at least 100%, 99.5%, 99%, 98%, 97%, 96%, 95%, 94%, 93%, 92%, 91%, 90%, 89%, 88%, 87%, 86%, 85%, 84%, 83%, 82%, 81%, 80%, 79%, 78%, 77%, 76%, 75%, 74%, 73%, 72%, 71%, or 70% identity to the amino acid sequence of at least one of Domain A, Domain B, Domain C, Domain D, Domain E, Domain F, Domain G, Domain H, Domain I, or Domain J of the OMNI CRISPR nuclease. In some embodiments, the peptide comprises at least one, at least two, at least three, at least four, at least five, at least six, at least seven, at least eight, at least nine, at least ten, or at least eleven amino acid sequences selected from the amino acid sequences having at least 100%, 99.5% 99%, 98%, 97%, 96%, 95%, 94%, 93%, 92%, 91%, 90%, 89%, 88%, 87%, 86%, 85%, 84%, 83%, 82%, 81%, 80%, 79%, 78%, 77%, 76%, 75%, 74%, 73%, 72%, 71%, or 70% identity to the amino acid sequences of Domain A, Domain B, Domain C, Domain D, Domain E, Domain F, Domain G, Domain H, Domain I, and Domain J of the OMNI CRISPR nuclease. Each possibility represents a separate embodiment. In an embodiment, the peptide exhibits extensive amino acid variability relative to the full length OMNI CRISPR nuclease amino acid sequence outside of an amino acid sequence having at least 100%, 99.5%, 99%, 98%, 97%, 96%, 95%, 94%, 93%, 92%, 91%, 90%, 89%, 88%, 87%, 86%, 85%, 84%, 83%, 82%, 81%, 80%, 79%, 78%, 77%, 76%, 75%, 74%, 73%, 72%, 71%, or 70% identity to the amino acid sequence of at least one of Domain A, Domain B, Domain C, Domain D, Domain E, Domain F, Domain G, Domain H, Domain I, or Domain J of the OMNI CRISPR nuclease. In an embodiment, the peptide comprises an intervening amino acid sequence between two domain sequences. In an embodiment, the intervening amino acid sequence is 1-10, 10-20, 20-40, 40-50, 50-60, 80-100, 100-150, 150-200, 200-250, up to 100, up to 200 or up to 300 amino acids in length. Each possibility represents a separate embodiment. In an embodiment, the intervening sequence is a linker sequence. In an embodiment, a CRISPR nuclease comprises multiple domains from an OMNI CRISPR nuclease, and the domains are preferably organized in alphabetical order from the N-terminus to the C-terminus of the CRISPR nuclease. For example, a CRISPR nuclease comprising Domain A, Domain E, and Domain I of OMNI, the order of those domains in the CRISPR nuclease sequence would be Domain A, Domain E, and finally Domain I, with the possibility of intervening sequences on either end or both ends of each domain.

[0343] In one aspect of the invention, an amino acid sequence encoding any one of the domains of an OMNI CRISPR nuclease described herein may comprise one or more amino acid substitutions relative to the original OMNI CRISPR nuclease domain sequence. The amino acid substitution may be a conservative substitution, i.e. substitution for an amino acid having similar chemical properties as the original amino acid. For example, a positively charged amino acid may be substituted for an alternate positively charged amino acid, e.g. an arginine residue may be substituted for a lysine residue, or a polar amino acid may be substituted for a different polar amino acid. Conservative substitutions are more tolerable, and the amino acid sequence encoding any one of the domains of the OMNI CRISPR nuclease may contain as many as 10% of such substitutions. The amino acid substitution may be a radical substitution, i.e. substitution for an amino acid having different chemical properties as the original amino acid. For example, a positively charged amino acid may be substituted for a negatively charged amino acid, e.g. an arginine residue may be substituted for a glutamic acid residue, or a polar amino acid may be substituted for a non-polar amino acid. The amino acid substitution may be a semi-conservative substitution, or the amino acid substitution may be to any other amino acid. The substitution may alter the activity relative to the original OMNI CRISPR nuclease domain function e.g. reduce catalytic nuclease activity.

According to some aspects of the invention, the disclosed compositions comprise a non-naturally occurring composition comprising a CRISPR nuclease, wherein the CRISPR nuclease comprises an amino acid sequence corresponding to the amino acid sequence of at least one of Domain A, Domain B, Domain C, Domain D, Domain E, Domain F, Domain G, Domain H, Domain I, or Domain J of the OMNI CRISPR nuclease. The amino acid range of each domain within its respective OMNI CRISPR nuclease amino acid sequence is provided in Supplemental Table 1. In some embodiments of the invention, the CRISPR nuclease comprises at least one, at least two, at least three, at least four, or at least five amino acid sequences, wherein each amino acid sequence corresponds to any one of the amino acid sequences Domain A, Domain B, Domain C, Domain D, Domain E, Domain F, Domain G, Domain H, Domain I, or Domain J of the OMNI CRISPR nuclease. Accordingly, the CRISPR nuclease may include any combination of amino acid sequences that corresponds to any of Domain A, Domain B, Domain C, Domain D, Domain E, Domain F, Domain G, Domain H, Domain I, or Domain J of the OMNI CRISPR nuclease. In some embodiments, the amino acid sequence is at least 100-250, 250-500, 500-1000, 1000-1500, 1000-1700, or 1000-2000 amino acids in length.

### Diseases and Therapies

[0344] Certain embodiments of the invention target a nuclease to a specific genetic locus associated with a disease or disorder as a form of gene editing, method of treatment, or therapy. For example, to induce editing or knockout of a gene, a novel nuclease disclosed herein may be specifically targeted to a pathogenic mutant allele of the gene using a custom designed guide RNA molecule. The guide RNA molecule is preferably designed by first considering the PAM requirement of the nuclease, which as shown herein is also dependent on the system in which the gene editing is being performed. For example, a guide RNA molecule designed to target an OMNI-90 nuclease to a target site is designed to contain a spacer region complementary to a DNA strand of a DNA double-stranded region that neighbors a OMNI-90 PAM sequence, e.g. “NNVTDNNN” or “NNATWBNN.” The guide RNA molecule is further preferably designed to contain a spacer region (i.e. the region of the guide RNA molecule having complementarity to the target allele) of sufficient and preferably optimal length in order to increase specific activity of the nuclease and reduce off-target effects.

[0345] As a non-limiting example, the guide RNA molecule may be designed to target the nuclease to a specific region of a mutant allele, e.g. near the start codon, such that upon DNA damage caused by the nuclease a non-homologous end joining (NHEJ) pathway is induced and leads to silencing of the mutant allele by introduction of frameshift mutations. This approach to guide RNA molecule design is particularly useful for altering the effects of dominant negative mutations and thereby treating a subject. As a separate non-limiting example, the guide RNA molecule may be designed to target a specific pathogenic mutation of a mutated allele, such that upon DNA damage caused by the nuclease a homology directed repair (HDR) pathway is induced and leads to template mediated correction of the mutant allele. This approach to guide RNA molecule design is particularly useful for altering haploinsufficiency effects of a mutated allele and thereby treating a subject.

[0346] Non-limiting examples of specific genes which may be targeted for alteration to treat a disease or disorder are presented herein below. Specific disease-associated genes and mutations that induce a mutation disorder are described in the literature. Such mutations can be used to design a DNA-targeting RNA molecule to target a CRISPR composition to an allele of the disease associated gene, where the CRISPR composition causes DNA damage and induces a DNA repair pathway to alter the allele and thereby treat the mutation disorder.

[0347] Mutations in the ELANE gene are associated with neutropenia. Accordingly, without limitation, embodiments of the invention that target ELANE may be used in methods of treating subjects afflicted with neutropenia.

[0348] CXCR4 is a co-receptor for the human immunodeficiency virus type 1 (HIV-1) infection. Accordingly, without limitation, embodiments of the invention that target CXCR4 may be used in methods of treating subjects afflicted with HIV-1 or conferring resistance to HIV-1 infection in a subject.

[0349] Programmed cell death protein 1 (PD-1) disruption enhances CAR-T cell mediated killing of tumor cells and PD-1 may be a target in other cancer therapies. Accordingly, without limitation, embodiments of the invention that target PD-1 may be used in methods of treating subjects afflicted with cancer. In an embodiment, the treatment is CAR-T cell therapy with T cells that have been modified according to the invention to be PD-1 deficient.

[0350] In addition, BCL11A is a gene that plays a role in the suppression of hemoglobin production. Globin production may be increased to treat diseases such as thalassemia or sickle cell anemia by inhibiting BCL11A. See for example, PCT International Publication No. WO 2017/077394A2; U.S. Publication No. US2011/0182867A1; Humbert et al. Sci. Transl. Med. (2019); and Canver et al. Nature (2015). Accordingly, without limitation, embodiments of the invention that target an enhancer of BCL11A may be used in methods of treating subjects afflicted with beta thalassemia or sickle cell anemia.

[0351] Embodiments of the invention may also be used for targeting any disease-associated gene, for studying, altering, or treating any of the diseases or disorders listed in Table A or Table B below. Indeed, any disease-associated with a genetic locus may be studied, altered, or treated by using the nucleases disclosed herein to target the appropriate disease-associated gene, for example, those listed in U.S. Publication No. 2018/0282762A1 and European Patent No. EP3079726B1.

TABLE A
Diseases, Disorders and their associated genes

| DISEASE/DISORDERS | GENE(S) |
|---|---|
| Neoplasia | PTEN; ATM; ATR; EGFR; ERBB2; |
| | ERBB3; ERBB4; Notch1; Notch2; |
| | Notch3; Notch4; AKT; AKT2; AKT3; |
| | HIF; HIIF1a; HIF3a; MET; HRG; Bcl2; |
| | PPAR alpha; PPAR gamma; WT1 |
| | (Wilms Tumor); FGF Receptor Family |
| | members (5 members: 1, 2, 3, 4, 5); |
| | CDKN2a; APC; RB (retinoblastoma); |
| | MEN1; VHL; BRCA1; BRCA2; AR |
| | (Androgen Receptor); TSG101; IGF; |
| | IGF Receptor; Igf1 (4 variants); gf2 |
| | (3 variants); Igf 1 Receptor; Igf 2 |
| | Receptor; Bax; Bcl2; caspases family |
| | (9 members: 1, 2, 3, 4, 6, 7, 8, 9, 12); |
| | Kras; Apc |
| Age-related Macular | Abcr; Ccl2; Cc2; cp (ceruloplasmin); |
| Degeneration | Timp3; cathepsinD; Vldlr; Ccr2 |
| Schizophrenia | Neuregulin1 (Nrg1); Erb4 (receptor |
| | for Neuregulin); Complexin1 (Cp1x1); |
| | Tph1 Tryptophan hydroxylase; Tph2 |
| | Tryptophan hydroxylase 2; Neurexin 1; |
| | GSK3; GSK3a; GSK3b |
| Neurological, Neuro | 5-HTT (S1c6a4); COMT; DRD (Drd1a); |
| degenerative, and | SLC6A3; DAOA; DTNBP1; Dao (Dao1) |
| Movement Disorders | |
| Trinucleotide Repeat | HTT (Huntington’s Dx); SBMA/SMAX1/ |
| Disorders | AR (Kennedy’s Dx); FXN/X25 |
| | (Friedrich’s Ataxia); ATX3 (Machado- |
| | Joseph’s Dx); ATXN1 and ATXN2 |
| | (spinocerebellar ataxias); DMPK |
| | (myotonic dystrophy); Atrophin-1 and |
| | Atn1 (DRPLA Dx); CBP (Creb-BP- |
| | global instability); VLDLR (Alzheimer’s); |
| | Atxn7; Atxn10 |
| Fragile X Syndrome | FMR2; FXR1; FXR2; mGLUR5 |
| Secretase Related | APH-1 (alpha and beta); Presenilin |
| Disorders | (Psen1); nicastrin (Ncstn); PEN-2 |
| Others | Nos1; Parp1; Nat1; Nat2 |
| Prion related disorders | Prp |
| ALS | SOD1; ALS2; STEX; FUS; TARDBP; |
| | VEGF (VEGF-a; VEGF-b; VEGF-c) |
| Addiction | Prkce (alcohol); Drd2; Drd4; ABAT |
| | (alcohol); GRIA2; Grm5; Grin1; Htr1b; |
| | Grin2a, Drd3; Pdyn; Gria1 (alcohol) |
| Autism | Mecp2; BZRAP1; MDGA2; Sema5A; |
| | Neurexin 1; Fragile X (FMR2 (AFF2); |
| | FXR1; FXR2; Mglur5) |
| Alzheimer’s Disease | E1; CHIP; UCH; UBB; Tau; LRP; |
| | PICALM; Clusterin; PS1; SORL1; |
| | CR1; Vldlr; Uba1; Uba3; CHIP28 (Aqp1, |
| | Aquaporin 1); Uchl1; Uchl3; APP |
| Inflammation | IL-10; IL-1 (IL-1a; IL-1b); IL-13; IL-17 |
| | (IL-17a (CTLA8); IL-17b; IL-17c; |
| | IL-17d; IL-17f); II-23; Cx3cr1; ptpn22; |
| | TNFa; NOD2/CARD15 for IBD; |
| | IL-6; IL-12 (IL-12a; IL-12b); CTLA4; |
| | Cx3cl1 |
| Parkinson’s Disease | x-Synuclein; DJ-1; LRRK2; Parkin; |
| | PINK1 |

TABLE B
Diseases, Disorders and their associated genes

| DISEASE CATEGORY | DISEASE AND ASSOCIATED GENES |
|---|---|
| Blood and coagulation | Anemia (CDAN1, CDA1, RPS19, DBA, |
| diseases and disorders | PKLR, PK1, NT5C3, UMPH1, PSN1, |
| | RHAG, RH50A, NRAMP2, SPTB, |
| | ALAS2, ANH1, ASB, ABCB1, ABC7, |
| | ASAT); Bare lymphocyte syndrome |
| | (TAPBP, TPSN, TAP2, ABCB3, PSF2, |
| | RING11, MHC2TA, C2TA, RFX5, |
| | RFXAP, RFX5), Bleeding disorders |
| | (TBXA2R, P2RX1, P2X1); Factor H |
| | and factor H-like 1 (HF1, CFH, HUS); |
| | Factor V and factor VIII (MCFD2); |
| | Factor VII deficiency (F7); Factor X |
| | deficiency (F10); Factor XI deficiency |
| | (F11); Factor XII deficiency (F12, HAF); |
| | Factor XIIIA deficiency (F13A1, F13A); |
| | Factor XIIIB deficiency (F13B); |
| | Fanconi anemia (FANCA, FACA, FA1, |
| | FA, FAA, FAAP95, FAAP90, FLJ34064, |
| | FANCB, FANCC, FACC, BRCA2, |
| | FANCD1, FANCD2, FANCD, FACD, |
| | FAD, FANCE, FACE, FANCF, |
| | XRCC9, FANCG, BRIP1, BACH1, |
| | FANCJ, PHF9, FANCL, FANCM, |
| | KIAA1596); Hemophagocytic |
| | lymphohistiocytosis disorders (PRF1, |
| | HPLH2, UNC13D, MUNC13-4, |
| | HPLH3, HLH3, FHL3); Hemophilia A |
| | (F8, F8C, HEMA); Hemophilia B |
| | (F9, HEMB), Hemorrhagic disorders |
| | (PI, ATT, F5); Leukocyde deficiencies |
| | and disorders (ITGB2, CD18, LCAMB, |
| | LAD, EIF2B1, EIF2BA, EIF2B2, |
| | EIF2B3, EIF2B5, LVWM, CACH, CLE, |
| | EIF2B4); Sickle cell anemia (HBB); |
| | Thalassemia (HBA2, HBB, HBD, LCRB, |
| | HBA1) |
| Cell dysregulation and | B-cell non-Hodgkin lymphoma |
| oncology diseases and | (BCL7A, BCL7); Leukemia (TAL1, |
| disorders | TCL5, SCL, TAL2, FLT3, NBS1, NBS, |
| | ZNFN1A1, IK1, LYF1, HOXD4, |
| | HOX4B, BCR, CML, PHL, ALL, ARNT, |
| | KRAS2, RASK2, GMPS, AF10, |
| | ARHGEF12, LARG, KIAA0382, CALM, |
| | CLTH, CEBPA, CEBP, CHIC2, BTL, |
| | FLT3, KIT, PBT, LPP, NPM1, NUP214, |
| | D9S46E, CAN, CAIN, RUNX1, |
| | CBFA2, AML1, WHSC1L1, NSD3, |
| | FLT3, AF1Q, NPM1, NUMA1, ZNF145, |
| | PLZF, PML, MYL, STAT5B, AF10, |
| | CALM, CLTH, ARL11, ARLTS1, |
| | P2RX7, P2X7, BCR, CML, PHL, ALL, |
| | GRAF, NF1, VRNF, WSS, NFNS, |
| | PTPN11, PTP2C, SHP2, NS1, BCL2, CCND1, |
| | PRAD1, BCL1, TCRA, GATA1, GF1, |
| | ERYF1, NFE1, ABL1, NQO1, DIA4, |
| | NMOR1, NUP214, D9S46E, CAN, |
| | CAIN) |
| Inflammation and | AIDS (KIR3DL1, NKAT3, NKB1, |
| immune related | AMB11, KIR3DS1, IFNG, CXCL12, |
| diseases and disorders | SDF1); Autoimmune lymphoproliferative |
| | syndrome (TNFRSF6, APT1, FAS, CD95, |
| | ALPS1A); Combined immunodeficiency, |
| | (IL2RG, SCIDX1, SCIDX, IMD4); |
| | HIV-1 (CCL5, SCYA5, D17S136E, |
| | TCP228), HIV susceptibility or infection |
| | (IL10, CSIF, CMKBR2, CCR2, CMKBR5, |
| | CCCKR5 (CCR5)); Immunodeficiencies |
| | (CD3E, CD3G, AICDA, AID, HIGM2, |
| | TNFRSF5, CD40, UNG, DGU, HIGM4, |
| | TNFSF5, CD40LG, HIGM1, IGM, FOXP3, |
| | IPEX, AIID, XPID, PIDX, TNFRSF14B, |
| | TACI); Inflammation (IL-10, IL-1 (IL-1a, |
| | IL-1b), IL-13, IL-17 (IL-17a (CTLA8), |
| | IL-17b, IL-17c, IL-17d, IL-17f), II-23, |
| | Cx3cr1, ptpn22, TNFa, NOD2/CARD15 |
| | for IBD, IL-6, IL-12 (IL-12a, IL-12b), |
| | CTLA4, Cx3cl1); Severe combined |
| | immunodeficiencies (SCIDs)(JAK3, JAKL, |
| | DCLRE1C, ARTEMIS, SCIDA, RAG1, |
| | RAG2, ADA, PTPRC, CD45, LCA, IL7R, |
| | CD3D, T3D, IL2RG, SCIDX1, SCIDX, |
| | IMD4) |
| Metabolic, liver, | Amyloid neuropathy (TTR, PALB); |
| kideny and protein | Amyloidosis (APOA1, APP, AAA, CVAP, |
| diseases and disorders | AD1, GSN, FGA, LYZ, TTR, PALB); |
| | Cirrhosis (KRT18, KRT8, CIRH1A, |
| | NAIC, TEX292, KIAA1988); Cystic |
| | fibrosis (CFTR, ABCC7, CF, MRP7); |
| | Glycogen storage diseases (SLC2A2, |
| | GLUT2, G6PC, G6PT, G6PT1, GAA, |
| | LAMP2, LAMPB, AGL, GDE, GBE1, |
| | GYS2, PYGL, PFKM); Hepatic adenoma, |
| | 142330 (TCF1, HNF1A, MODY3), |
| | Hepatic failure, early onset, and |
| | neurologic disorder (SCOD1, SCO1), |
| | Hepatic lipase deficiency (LIPC), |
| | Hepatoblastoma, cancer and carcinomas |
| | (CTNNB1, PDGFRL, PDGRL, PRLTS, |
| | AXIN1, CTNNB1, TP53, P53, LFS1, |
| | IGF2R, MPRI, MET, CASP8, MCH5; |
| | Medullary cystic kidney disease (UMOD, |
| | HNFJ, FJHN, MCKD2, ADMCKD2); |
| | Phenylketonuria (PAH, PKU1, QDPR, |
| | DHPR, PTS); Polycystic kidney and |
| | hepatic disease (FCYT, PKHD1, ARPKD, |
| | PKD1, PKD2, PKD4, PKDTS, PRKCSH, |
| | G19P1, PCLD, SEC63) |
| Muscular/Skeletal | Becker muscular dystrophy (DMD, BMD, |
| disease and disorders | MYF6), Duchenne Muscular Dystrophy |
| | (DMD, BMD); Emery-Dreifuss muscular |
| | dystrophy (LMNA, LMN1, EMD2, FPLD, |
| | CMD1A, HGPS, LGMD1B, LMNA, LMN1, |
| | EMD2, FPLD, CMD1A); Facioscpulohumeral |
| | muscular dystrophy (FSHMD1A, FSHD1A); |
| | Muscukar dystrophy (FKRP, MDC1C, |
| | LGMD2I, LAMA2, LAMM, LARGE, |
| | KIAA0609, MDC1D, FCMD, TTID, |
| | MYOT, CAPN3, CANP3, DYSF, LGMD2B, |
| | SGCG, LGMD2C, DMDA1, SCG3, SGCA, |
| | ADL, DAG2, LGMD2D, DMDA2, SGCB, |
| | LGMD2E, SGCD, SGD, LGMD2F, CMD1L, |
| | TCAP, LGMD2G, CMD1N, TRIM32, HT2A, |
| | LGMD2H, FKRP, MDC1C, LGMD2I, TTN, |
| | CMD1G, TMD, LGMD2J, POMT1, CAV3, |
| | LGMD1C, SEPN1, SELN, RSMD1, PLEC1, |
| | PLTN, EBS1); Osteopetrosis (LRP5, BMND1, |
| | LRP7, LR3, OPPG, VBCH2, CLCN7, CLC7, |
| | OPTA2, OSTM1, GL, TCIRG1, TIRC7, |
| | OC116, OPTB1); Muscular atrophy (VAPB, |
| | VAPC, ALS8, SMN1, SMA1, SMA2, SMA3, |
| | SMA4, BSCL2, SPG17, GARS, SMAD1, |
| | CMT2D, HEXB, IGHMBP2, SMUBP2, |
| | CATF1, SMARD1) |
| Dermatological | Albinisim (TYR, OCA2, TYRP1, SLC45A2, |
| diseases and disorders | LYST), Ectodermal dysplasias (EDAR, |
| | EDARADD, WNT10A), Ehlers-Danlos |
| | syndrome (COL5A1, COL5A2, COL1A1, |
| | COL1A2, COL3A1, TNXB, ADAMTS2, |
| | PLOD1, FKBP14), Ichthyosis-associated |
| | disorders (FLG, STS, TGM1, ALOXE3/ |
| | ALOX12B, KRT1, KRT10, ABCA12, |
| | KRT2, GJB2, TGM1, ABCA12, CYP4F22, |
| | ALOXE3, CERS3, NSHDL, EBP, MBTPS2, |
| | GJB2, SPINK5, AGHD5, PHYH, PEX7, |
| | ALDH3A2, ERCC2, ERCC3, GFT2H5, |
| | GBA), Incontinentia pigmenti (IKBKG, |
| | NEMO), Tuberous sclerosis (TSC1, TSC2), |
| | Premature aging syndromes (POLR3A, |
| | PYCR1, LMNA, POLD1, WRN, DMPK) |
| Neurological and | ALS (SOD1, ALS2, STEX, FUS, TARDBP, |
| Neuronal diseases and | VEGF (VEGF-a, VEGF-b, VEGF-c); |
| disorders | Alzheimer disease (APP, AAA, CVAP, AD1, |
| | APOE, AD2, PSEN2, AD4, STM2, APBB2, |
| | FE65L1, NOS3, PLAU, URK, ACE, DCP1, |
| | ACE1, MPO, PACIP1, PAXIP1L, PTIP, |
| | A2M, BLMH, BMH, PSEN1, AD3); |
| | Autism (Mecp2, BZRAP1, MDGA2, Sema5A, |
| | Neurexin 1, GLO1, MECP2, RTT, PPMX, |
| | MRX16, MRX79, NLGN3, NLGN4, |
| | KIAA1260, AUTSX2); Fragile X Syndrome |
| | (FMR2, FXR1, FXR2, mGLUR5); |
| | Huntington’s disease and disease like |
| | disorders (HD, IT15, PRNP, PRIP, JPH3, |
| | JP3, HDL2, TBP, SCA17); Parkinson disease |
| | (NR4A2, NURR1, NOT, TINUR, SNCAIP, |
| | TBP, SCA17, SNCA, NACP, PARK1, |
| | PARK4, DJ1, PARK7, LRRK2, PARK8, |
| | PINK1, PARK6, UCHL1, PARK5, SNCA, |
| | NACP, PARK1, PARK4, PRKN, PARK2, |
| | PDJ, DBH, NDUFV2); Rett syndrome |
| | (MECP2, RTT, PPMX, MRX16, MRX79, |
| | CDKL5, STK9, MECP2, RTT, PPMX, |
| | MRX16, MRX79, x-Synuclein, DJ-1); |
| | Schizophrenia (Neuregulin1 (Nrg1), Erb4 |
| | (receptor for Neuregulin), Complexin1 |
| | (Cplx1), Tph1 Tryptophan hydroxylase, |
| | Tph2, Tryptophan hydroxylase 2, Neurexin 1, |
| | GSK3, GSK3a, GSK3b, 5-HTT (Slc6a4), |
| | COMT, DRD (Drd1a), SLC6A3, DAOA, |
| | DTNBP1, Dao (Dao1)); Secretase Related |
| | Disorders (APH-1 (alpha and beta), Presenilin |
| | (Psen1), nicastrin, (Ncstn), PEN-2, Nos1, |
| | Parp1, Natl, Nat2); Trinucleotide Repeat |
| | Disorders (HTT (Huntington’s Dx), |
| | SBMA/SMAX1/AR (Kennedy’s Dx), |
| | FXN/X25 (Friedrich’s Ataxia), ATX3 |
| | (Machado-Joseph’s Dx), ATXN1 and ATXN2 |
| | (spinocerebellar ataxias), DMPK (myotonic |
| | dystrophy), Atrophin-1 and Atn1 (DRPLA Dx), |
| | CBP (Creb-BP-global instability), VLDLR |
| | (Alzheimer’s), Atxn7, Atxn10) |
| Ocular diseases and | Age-related macular degeneration (Abcr, |
| disorders | Ccl2, Cc2, cp (ceruloplasmin), Timp3, |
| | cathepsinD, Vldlr, Ccr2); Cataract (CRYAA, |
| | CRYA1, CRYBB2, CRYB2, PITX3, BFSP2, |
| | CP49, CP47, CRYAA, CRYA1, PAX6, AN2, |
| | MGDA, CRYBA1, CRYB1, CRYGC, CRYG3, |
| | CCL, LIM2, MP19, CRYGD, CRYG4, BFSP2, |
| | CP49, CP47, HSF4, CTM, HSF4, CTM, MIP, |
| | AQP0, CRYAB, CRYA2, CTPP2, CRYBB1, |
| | CRYGD, CRYG4, CRYBB2, CRYB2, |
| | CRYGC, CCL, CRYAA, CRYA1, GJA8, |
| | CX50, CAE1, GJA3, CX46, CZP3, CAE3, |
| | CCM1, CAM, KRIT1); Corneal clouding |
| | and dystrophy (APOA1, TGFBI, CSD2, |
| | CDGG1, CSD, BIGH3, CDG2, TACSTD2, |
| | TROP2, M1S1, VSX1, RINX, PPCD, PPD, |
| | KTCN, COL8A2, FECD, PPCD2, PIP5K3, |
| | CFD); Cornea plana congenital (KERA, |
| | CNA2); Glaucoma (MYOC, TIGR, GLC1A, |
| | JOAG, GPOA, OPTN, GLC1E, FIP2, HYPL, |
| | NRP, CYP1B1, GLC3A, OPA1, NTG, NPG, |
| | CYP1B1, GLC3A); Leber congenital |
| | amaurosis (CRB1, RP12, CRX, CORD2, |
| | CRD, RPGRIP1, LCA6, CORD9, RPE65, |
| | RP20, AIPL1, LCA4, GUCY2D, GUC2D, |
| | LCA1, CORD6, RDH12, LCA3); Macular |
| | dystrophy (ELOVL4, ADMD, STGD2, |
| | STGD3, RDS, RP7, PRPH2, PRPH, AVMD, |
| | AOFMD, VMD2) |

[0352] Unless otherwise defined, all technical and/or scientific terms used herein have the same meaning as commonly understood by one of ordinary skill in the art to which the invention pertains. Although methods and materials similar or equivalent to those described herein can be used in the practice or testing of embodiments of the invention, exemplary methods and/or materials are described below. In case of conflict, the patent specification, including definitions, will control. In addition, the materials, methods, and examples are illustrative only and are not intended to be necessarily limiting.

[0353] In the discussion unless otherwise stated, adjectives such as “substantially” and “about” modifying a condition or relationship characteristic of a feature or features of an embodiment of the invention, are understood to mean that the condition or characteristic is defined to within tolerances that are acceptable for operation of the embodiment for an application for which it is intended. Unless otherwise indicated, the word “or” in the specification and claims is considered to be the inclusive “or” rather than the exclusive or, and indicates at least one of and any combination of items it conjoins.

[0354] It should be understood that the terms “a” and “an” as used above and elsewhere herein refer to “one or more” of the enumerated components. It will be clear to one of ordinary skill in the art that the use of the singular includes the plural unless specifically stated otherwise. Therefore, the terms “a,” “an” and “at least one” are used interchangeably in this application.

[0355] For purposes of better understanding the present teachings and in no way limiting the scope of the teachings, unless otherwise indicated, all numbers expressing quantities, percentages or proportions, and other numerical values used in the specification and claims, are to be understood as being modified in all instances by the term “about.” Accordingly, unless indicated to the contrary, the numerical parameters set forth in the following specification and attached claims are approximations that may vary depending upon the desired properties sought to be obtained. At the very least, each numerical parameter should at least be construed in light of the number of reported significant digits and by applying ordinary rounding techniques.

[0356] It is understood that where a numerical range is recited herein, the present invention contemplates each integer between, and including, the upper and lower limits, unless otherwise stated.

[0357] In the description and claims of the present application, each of the verbs, “comprise,” “include” and “have” and conjugates thereof, are used to indicate that the object or objects of the verb are not necessarily a complete listing of components, elements or parts of the subject or subjects of the verb. Other terms as used herein are meant to be defined by their well-known meanings in the art.

[0358] The terms “polynucleotide”, “nucleotide”, “nucleotide sequence”, “nucleic acid” and “oligonucleotide” are used interchangeably. They refer to a polymeric form of nucleotides of any length, either deoxyribonucleotides or ribonucleotides, or analogs thereof. Polynucleotides may have any three-dimensional structure, and may perform any function, known or unknown. The following are non-limiting examples of polynucleotides: coding or non-coding regions of a gene or gene fragment, loci (locus) defined from linkage analysis, exons, in Irons, messenger RNA (mRNA), transfer RNA, ribosomal RNA, short interfering RNA (siRNA), short-hairpin RNA (shRNA), micro-RNA (miRNA), ribozymes, cDNA, recombinant polynucleotides, branched polynucleotides, plasmids, vectors, isolated DNA of any sequence, isolated RNA of any sequence, nucleic acid probes, and primers, A polynucleotide may comprise one or more modified nucleotides, such as methylated nucleotides and nucleotide analogs. If present, modifications to the nucleotide structure may be imparted before or after assembly of the polymer. The sequence of nucleotides may be interrupted by non-nucleotide components. A polynucleotide may be further modified after polymerization, such as by conjugation with a labeling component.

[0359] The term “nucleotide analog” or “modified nucleotide” refers to a nucleotide that contains one or more chemical modifications (e.g., substitutions), in or on the nitrogenous base of the nucleoside (e.g., cytosine (C), thymine (T) or uracil (U), adenine (A) or guanine (G)), in or on the sugar moiety of the nucleoside (e.g., ribose, deoxyribose, modified ribose, modified deoxyribose, six-membered sugar analog, or open-chain sugar analog), or the phosphate. Each of the RNA sequences described herein may comprise one or more nucleotide analogs.

[0360] As used herein, the following nucleotide identifiers are used to represent a referenced nucleotide base(s):

| Nucleotide | | | | |
|---|---|---|---|---|
| reference | Base(s) represented | | | |
| A | A | | | |
| C | | C | | |
| G | | | G | |
| T | | | | T |
| W | A | | | T |
| S | | C | G | |
| M | A | C | | |
| K | | | G | T |
| R | A | | G | |
| Y | | C | | T |
| B | | C | G | T |
| D | A | | G | T |
| H | A | C | | T |
| V | A | C | G | |
| N | A | C | G | T |

[0361] As used herein, the term “targeting sequence” or “targeting molecule” refers a nucleotide sequence or molecule comprising a nucleotide sequence that is capable of hybridizing to a specific target sequence, e.g., the targeting sequence has a nucleotide sequence which is at least partially complementary to the sequence being targeted along the length of the targeting sequence. The targeting sequence or targeting molecule may be part of a targeting RNA molecule that can form a complex with a CRISPR nuclease with the targeting sequence serving as the targeting portion of the CRISPR complex. When the molecule having the targeting sequence is present contemporaneously with the CRISPR molecule, the RNA molecule is capable of targeting the CRISPR nuclease to the specific target sequence. Each possibility represents a separate embodiment. A targeting RNA molecule can be custom designed to target any desired sequence.

[0362] The term “targets” as used herein, refers to preferential hybridization of a targeting sequence or a targeting molecule to a nucleic acid having a targeted nucleotide sequence. It is understood that the term “targets” encompasses variable hybridization efficiencies, such that there is preferential targeting of the nucleic acid having the targeted nucleotide sequence, but unintentional off-target hybridization in addition to on-target hybridization might also occur. It is understood that where an RNA molecule targets a sequence, a complex of the RNA molecule and a CRISPR nuclease molecule targets the sequence for nuclease activity.

[0363] In the context of targeting a DNA sequence that is present in a plurality of cells, it is understood that the targeting encompasses hybridization of the guide sequence portion of the RNA molecule with the sequence in one or more of the cells, and also encompasses hybridization of the RNA molecule with the target sequence in fewer than all of the cells in the plurality of cells. Accordingly, it is understood that where an RNA molecule targets a sequence in a plurality of cells, a complex of the RNA molecule and a CRISPR nuclease is understood to hybridize with the target sequence in one or more of the cells, and also may hybridize with the target sequence in fewer than all of the cells. Accordingly, it is understood that the complex of the RNA molecule and the CRISPR nuclease introduces a double strand break in relation to hybridization with the target sequence in one or more cells and may also introduce a double strand break in relation to hybridization with the target sequence in fewer than all of the cells. As used herein, the term “modified cells” refers to cells in which a double strand break is affected by a complex of an RNA molecule and the CRISPR nuclease as a result of hybridization with the target sequence, i.e. on-target hybridization.

[0364] As used herein the term “wild type” is a term of the art understood by skilled persons and means the typical form of an organism, strain, gene or characteristic as it occurs in nature as distinguished from mutant or variant forms. Accordingly, as used herein, where a sequence of amino acids or nucleotides refers to a wild type sequence, a variant refers to variant of that sequence, e.g., comprising substitutions, deletions, insertions. In embodiments of the present invention, an engineered CRISPR nuclease is a variant CRISPR nuclease comprising at least one amino acid modification (e.g., substitution, deletion, and/or insertion) compared to the CRISPR nuclease of any of the CRISPR nucleases indicated in Table 1.

[0365] The terms “non-naturally occurring” or “engineered” are used interchangeably and indicate human manipulation. The terms, when referring to nucleic acid molecules or polypeptides may mean that the nucleic acid molecule or the polypeptide is at least substantially free from at least one other component with which they are naturally associated in nature and as found in nature.

[0366] As used herein the term “amino acid” includes natural and/or unnatural or synthetic amino acids, including glycine and both the D or I, optical isomers, and amino acid analogs and peptidomimetics.

[0367] As used herein, “genomic DNA” refers to linear and/or chromosomal DNA and/or to plasmid or other extrachromosomal DNA sequences present in the cell or cells of interest. In some embodiments, the cell of interest is a eukaryotic cell. In some embodiments, the cell of interest is a prokaryotic cell. In some embodiments, the methods produce double-stranded breaks (DSBs) at pre-determined target sites in a genomic DNA sequence, resulting in mutation, insertion, and/or deletion of DNA sequences at the target site(s) in a genome.

[0368] “Eukaryotic” cells include, but are not limited to, fungal cells (such as yeast), plant cells, animal cells, mammalian cells and human cells.

[0369] The term “nuclease” as used herein refers to an enzyme capable of cleaving the phosphodiester bonds between the nucleotide subunits of nucleic acid. A nuclease may be isolated or derived from a natural source. The natural source may be any living organism. Alternatively, a nuclease may be a modified or a synthetic protein which retains the phosphodiester bond cleaving activity.

[0370] The term “PAM” as used herein refers to a nucleotide sequence of a target DNA located in proximity to the targeted DNA sequence and recognized by the CRISPR nuclease. The PAM sequence may differ depending on the nuclease identity.

[0371] The term “mutation disorder” or “mutation disease” as used herein refers to any disorder or disease that is related to dysfunction of a gene caused by a mutation. A dysfunctional gene manifesting as a mutation disorder contains a mutation in at least one of its alleles and is referred to as a “disease-associated gene.” The mutation may be in any portion of the disease-associated gene, for example, in a regulatory, coding, or non-coding portion. The mutation may be any class of mutation, such as a substitution, insertion, or deletion. The mutation of the disease-associated gene may manifest as a disorder or disease according to the mechanism of any type of mutation, such as a recessive, dominant negative, gain-of-function, loss-of-function, or a mutation leading to haploinsufficiency of a gene product.

[0372] A skilled artisan will appreciate that embodiments of the present invention disclose RNA molecules capable of complexing with a nuclease, e.g. a CRISPR nuclease, such as to associate with a target genomic DNA sequence of interest next to a protospacer adjacent motif (PAM). The nuclease then mediates cleavage of target DNA to create a double-stranded break within the protospacer.

[0373] In embodiments of the present invention, a CRISPR nuclease and a targeting molecule form a CRISPR complex that binds to a target DNA sequence to effect cleavage of the target DNA sequence. A CRISPR nuclease may form a CRISPR complex comprising the CRISPR nuclease and RNA molecule without a further, separate tracrRNA molecule. Alternatively, CRISPR nucleases may form a CRISPR complex between the CRISPR nuclease, an RNA molecule, and a tracrRNA molecule.

[0374] The term “protein binding sequence” or “nuclease binding sequence” refers to a sequence capable of binding with a CRISPR nuclease to form a CRISPR complex. A skilled artisan will understand that a tracrRNA capable of binding with a CRISPR nuclease to form a CRISPR complex comprises a protein or nuclease binding sequence.

[0375] An “RNA binding portion” of a CRISPR nuclease refers to a portion of the CRISPR nuclease which may bind to an RNA molecule to form a CRISPR complex, e.g. the nuclease binding sequence of a tracrRNA molecule. An “activity portion” or “active portion” of a CRISPR nuclease refers to a portion of the CRISPR nuclease which effects a double strand break in a DNA molecule, for example when in complex with a DNA-targeting RNA molecule.

[0376] An RNA molecule may comprise a sequence sufficiently complementary to a tracrRNA molecule so as to hybridize to the tracrRNA via basepairing and promote the formation of a CRISPR complex. (See U.S. Pat. No. 8,906,616). In embodiments of the present invention, the RNA molecule may further comprise a portion having a tracr mate sequence.

[0377] In embodiments of the present invention, the targeting molecule may further comprise the sequence of a tracrRNA molecule. Such embodiments may be designed as a synthetic fusion of the guide portion of the RNA molecule (gRNA or crRNA) and the trans-activating crRNA (tracrRNA), together forming a single guide RNA (sgRNA). (See Jinek et al., Science (2012)). Embodiments of the present invention may also form CRISPR complexes utilizing a separate tracrRNA molecule and a separate RNA molecule comprising a guide sequence portion. In such embodiments the tracrRNA molecule may hybridize with the RNA molecule via base pairing and may be advantageous in certain applications of the invention described herein.

[0378] In embodiments of the present invention an RNA molecule may comprise a “nexus” region and/or “hairpin” regions which may further define the structure of the RNA molecule. (See Briner et al., Molecular Cell (2014)).

[0379] As used herein, the term “direct repeat sequence” refers to two or more repeats of a specific amino acid sequence of nucleotide sequence.

[0380] As used herein, an RNA sequence or molecule capable of “interacting with” or “binding” with a CRISPR nuclease refers to the RNA sequence or molecules ability to form a CRISPR complex with the CRISPR nuclease.

[0381] As used herein, the term “operably linked” refers to a relationship (i.e. fusion, hybridization) between two sequences or molecules permitting them to function in their intended manner. In embodiments of the present invention, when an RNA molecule is operably linked to a promoter, both the RNA molecule and the promotor are permitted to function in their intended manner.

[0382] As used herein, the term “heterologous promoter” refers to a promoter that does not naturally occur together with the molecule or pathway being promoted.

[0383] As used herein, a sequence or molecule has an X % “sequence identity” to another sequence or molecule if X % of bases or amino acids between the sequences of molecules are the same and in the same relative position. For example, a first nucleotide sequence having at least a 95% sequence identity with a second nucleotide sequence will have at least 95% of bases, in the same relative position, identical with the other sequence.

### Nuclear Localization Sequences

[0384] The terms “nuclear localization sequence” and “NLS” are used interchangeably to indicate an amino acid sequence/peptide that directs the transport of a protein with which it is associated from the cytoplasm of a cell across the nuclear envelope barrier. The term “NLS” is intended to encompass not only the nuclear localization sequence of a particular peptide, but also derivatives thereof that are capable of directing translocation of a cytoplasmic polypeptide across the nuclear envelope barrier. NLSs are capable of directing nuclear translocation of a polypeptide when attached to the N-terminus, the C-terminus, or both the N- and C-termini of the polypeptide. In addition, a polypeptide having an NLS coupled by its N- or C-terminus to amino acid side chains located randomly along the amino acid sequence of the polypeptide will be translocated. Typically, an NLS consists of one or more short sequences of positively charged lysines or arginines exposed on the protein surface, but other types of NLS are known. Non-limiting examples of NLSs include an NLS sequence derived from: the SV40 virus large T-antigen, nucleoplasmin, c-myc, the hRNPAl M9 NLS, the IBB domain from importin-alpha, myoma T protein, human p53, mouse c-abl IV, influenza vims NS1, Hepatitis virus delta antigen, mouse Mx1 protein, human poly(ADP-ribose) polymerase, and the steroid hormone receptors (human) glucocorticoid.

### Delivery

[0385] The CRISPR nuclease or CRISPR compositions described herein may be delivered as a protein, DNA molecules, RNA molecules, Ribonucleoproteins (RNP), nucleic acid vectors, or any combination thereof. In some embodiments, the RNA molecule comprises a chemical modification. Non-limiting examples of suitable chemical modifications include 2′-0-methyl (M), 2′-0-methyl, 3′phosphorothioate (MS) or 2′-0-methyl, 3′thioPACE (MSP), pseudouridine, and 1-methyl pseudo-uridine. Each possibility represents a separate embodiment of the present invention.

[0386] The CRISPR nucleases and/or polynucleotides encoding same described herein, and optionally additional proteins (e.g., ZFPs, TALENs, transcription factors, restriction enzymes) and/or nucleotide molecules such as guide RNA may be delivered to a target cell by any suitable means. The target cell may be any type of cell e.g., eukaryotic or prokaryotic, in any environment e.g., isolated or not, maintained in culture, in vitro, ex vivo, in vivo or in planta.

[0387] In some embodiments, the composition to be delivered includes mRNA of the nuclease and RNA of the guide. In some embodiments, the composition to be delivered includes mRNA of the nuclease, RNA of the guide and a donor template. In some embodiments, the composition to be delivered includes the CRISPR nuclease and guide RNA. In some embodiments, the composition to be delivered includes the CRISPR nuclease, guide RNA and a donor template for gene editing via, for example, homology directed repair. In some embodiments, the composition to be delivered includes mRNA of the nuclease, DNA-targeting RNA and the tracrRNA. In some embodiments, the composition to be delivered includes mRNA of the nuclease, DNA-targeting RNA and the tracrRNA and a donor template. In some embodiments, the composition to be delivered includes the CRISPR nuclease DNA-targeting RNA and the tracrRNA. In some embodiments, the composition to be delivered includes the CRISPR nuclease, DNA-targeting RNA and the tracrRNA and a donor template for gene editing via, for example, homology directed repair.

[0388] Any suitable viral vector system may be used to deliver RNA compositions. Conventional viral and non-viral based gene transfer methods can be used to introduce nucleic acids and/or CRISPR nuclease in cells (e.g., mammalian cells, plant cells, etc.) and target tissues. Such methods can also be used to administer nucleic acids encoding and/or CRISPR nuclease protein to cells in vitro. In certain embodiments, nucleic acids and/or CRISPR nuclease are administered for in vivo or ex vivo gene therapy uses. Non-viral vector delivery systems include naked nucleic acid, and nucleic acid complexed with a delivery vehicle such as a liposome or poloxamer. For a review of gene therapy procedures, see Anderson, Science (1992); Nabel and Felgner, TIBTECH (1993); Mitani and Caskey, TIBTECH (1993); Dillon, TIBTECH (1993); Miller, Nature (1992); Van Brunt, Biotechnology (1988); Vigne et al., Restorative Neurology and Neuroscience 8:35-36 (1995); Kremer and Perricaudet, British Medical Bulletin (1995); Haddada et al., Current Topics in Microbiology and Immunology (1995); and Yu et al., Gene Therapy 1:13-26 (1994).

[0389] Methods of non-viral delivery of nucleic acids and/or proteins include electroporation, lipofection, microinjection, biolistics, particle gun acceleration, virosomes, liposomes, immunoliposomes, lipid nanoparticles (LNPs), polycation or lipid:nucleic acid conjugates, artificial virions, and agent-enhanced uptake of nucleic acids or can be delivered to plant cells by bacteria or viruses (e.g., Agrobacterium, Rhizobium sp. NGR234, Sinorhizoboium meliloti, Mesorhizobium loti, tobacco mosaic virus, potato virus X, cauliflower mosaic virus and cassava vein mosaic virus. See, e.g., Chung et al. Trends Plant Sci. (2006). Sonoporation using, e.g., the Sonitron 2000 system (Rich-Mar) can also be used for delivery of nucleic acids. Cationic-lipid mediated delivery of proteins and/or nucleic acids is also contemplated as an in vivo, ex vivo, or in vitro delivery method. See Zuris et al., Nat. Biotechnol. (2015), Coelho et al., N. Engl. J. Med. (2013); Judge et al., Mol. Ther. (2006); and Basha et al., Mol. Ther. (2011).

[0390] Non-viral vectors, such as transposon-based systems e.g. recombinant Sleeping Beauty transposon systems or recombinant PiggyBac transposon systems, may also be delivered to a target cell and utilized for transposition of a polynucleotide sequence of a molecule of the composition or a polynucleotide sequence encoding a molecule of the composition in the target cell.

[0391] Additional exemplary nucleic acid delivery systems include those provided by Amaxa® Biosystems (Cologne, Germany), Maxcyte, Inc. (Rockville, Md.), BTX Molecular Delivery Systems (Holliston, Mass.) and Copernicus Therapeutics Inc., (see for example U.S. Pat. No. 6,008,336). Lipofection is described in e.g., U.S. Pat. Nos. 5,049,386, 4,946,787; and 4,897,355) and lipofection reagents are sold commercially (e.g., Transfectam™, Lipofectin™ and Lipofectamine™ RNAiMAX). Cationic and neutral lipids that are suitable for efficient receptor-recognition lipofection of polynucleotides include those disclosed in PCT International Publication Nos. WO/1991/017424 and WO/1991/016024. Delivery can be to cells (ex vivo administration) or target tissues (in vivo administration).

[0392] The preparation of lipid:nucleic acid complexes, including targeted liposomes such as immunolipid complexes, is well known to one of skill in the art (see, e.g., Crystal, Science (1995); Blaese et al., Cancer Gene Ther. (1995); Behr et al., Bioconjugate Chem. (1994); Remy et al., Bioconjugate Chem. (1994); Gao and Huang, Gene Therapy (1995); Ahmad and Allen, Cancer Res., (1992); U.S. Pat. Nos. 4,186,183; 4,217,344; 4,235,871; 4,261,975; 4,485,054; 4,501,728; 4,774,085; 4,837,028; and 4,946,787).

[0393] Additional methods of delivery include the use of packaging the nucleic acids to be delivered into EnGeneIC delivery vehicles (EDVs). These EDVs are specifically delivered to target tissues using bispecific antibodies where one arm of the antibody has specificity for the target tissue and the other has specificity for the EDV. The antibody brings the EDVs to the target cell surface and then the EDV is brought into the cell by endocytosis. Once in the cell, the contents are released (see MacDiamid et al., Nature Biotechnology (2009)).

[0394] Delivery vehicles include, but are not limited to, bacteria, preferably non-pathogenic, vehicles, nanoparticles, exosomes, microvesicles, gene gun delivery, for example, by attachment of a composition to a gold particle which is fired into a cell using via a “gene-gun”, viral vehicles, including but not limited to lentiviruses, AAV, and retroviruses), virus-like particles (VLPs). large VLPs (LVLPs), lentivirus-like particles, transposons, viral vectors, naked vectors, DNA, or RNA, among other delivery vehicles known in the art.

[0395] The delivery of a CRISPR nuclease and/or a polynucleotide encoding the CRISPR nuclease, and optionally additional nucleotide molecules and/or additional proteins or peptides, may be performed by utilizing a single delivery vehicle or method or a combination of different delivery vehicles or methods. For example, a CRISPR nuclease may be delivered to a cell utilizing an LNP, and a crRNA molecule and tracrRNA molecule may be delivered to the cell utilizing AAV. Alternatively, a CRISPR nuclease may be delivered to a cell utilizing an AAV particle, and a crRNA molecule and tracrRNA molecule may be delivered to the cell utilizing a separate AAV particle, which may be advantageous due to size limitations.

[0396] The use of RNA or DNA viral based systems for the delivery of nucleic acids take advantage of highly evolved processes for targeting a virus to specific cells in the body and trafficking the viral payload to the nucleus. Viral vectors can be administered directly to patients (in vivo) or they can be used to treat cells in vitro and the modified cells are administered to patients (ex vivo). Conventional viral based systems for the delivery of nucleic acids include, but are not limited to, recombinant retroviral, lentivirus, adenoviral, adeno-associated, vaccinia and herpes simplex virus vectors for gene transfer. However, an RNA virus is preferred for delivery of the RNA compositions described herein. Additionally, high transduction efficiencies have been observed in many different cell types and target tissues. Nucleic acid of the invention may be delivered by non-integrating lentivirus. Optionally, RNA delivery with Lentivirus is utilized. Optionally the lentivirus includes mRNA of the nuclease, RNA of the guide. Optionally the lentivirus includes mRNA of the nuclease, RNA of the guide and a donor template. Optionally, the lentivirus includes the nuclease protein, guide RNA. Optionally, the lentivirus includes the nuclease protein, guide RNA and/or a donor template for gene editing via, for example, homology directed repair. Optionally the lentivirus includes mRNA of the nuclease, DNA-targeting RNA, and the tracrRNA. Optionally the lentivirus includes mRNA of the nuclease, DNA-targeting RNA, and the tracrRNA, and a donor template. Optionally, the lentivirus includes the nuclease protein, DNA-targeting RNA, and the tracrRNA. Optionally, the lentivirus includes the nuclease protein, DNA-targeting RNA, and the tracrRNA, and a donor template for gene editing via, for example, homology directed repair.

[0397] As mentioned above, the compositions described herein may be delivered to a target cell using a non-integrating lentiviral particle method, e.g. a LentiFlash® system. Such a method may be used to deliver mRNA or other types of RNAs into the target cell, such that delivery of the RNAs to the target cell results in assembly of the compositions described herein inside of the target cell. See also PCT International Publication Nos. WO2013/014537, WO2014/016690, WO2016185125, WO2017194902, and WO2017194903.

[0398] The tropism of a retrovirus can be altered by incorporating foreign envelope proteins, expanding the potential target population of target cells. Lentiviral vectors are retroviral vectors capable of transducing or infecting non-dividing cells and typically produce high viral titers. Selection of a retroviral gene transfer system depends on the target tissue. Retroviral vectors are comprised of cis-acting long terminal repeats with packaging capacity for up to 6-10 kb of foreign sequence. The minimum cis-acting LTRs are sufficient for replication and packaging of the vectors, which are then used to integrate the therapeutic gene into the target cell to provide permanent transgene expression. Widely used retroviral vectors include those based upon murine leukemia virus (MuLV), gibbon ape leukemia virus (GaLV), Simian Immunodeficiency virus (SIV), human immunodeficiency virus (HIV), and combinations thereof (see, e.g., Buchscher Panganiban, J. Virol. (1992); Johann et al., J. Virol. (1992); Sommerfelt et al., Virol. (1990); Wilson et al., J. Virol. (1989); Miller et al., J. Virol. (1991); PCT International Publication No. WO/1994/026877A1).

[0399] At least six viral vector approaches are currently available for gene transfer in clinical trials, which utilize approaches that involve complementation of defective vectors by genes inserted into helper cell lines to generate the transducing agent.

[0400] pLASN and MFG-S are examples of retroviral vectors that have been used in clinical trials (Dunbar et al., Blood (1995); Kohn et al., Nat. Med. (1995); Malech et al., PNAS (1997)). PA317/pLASN was the first therapeutic vector used in a gene therapy trial. (Blaese et al., Science (1995)). Transduction efficiencies of 50% or greater have been observed for MFG-S packaged vectors. (Ellem et al., Immunol Immunother. (1997); Dranoff et al., Hum. Gene Ther. (1997).

[0401] Packaging cells are used to form virus particles that are capable of infecting a host cell. Such cells include 293 cells, which package adenovirus, AAV, and psi.2 cells or PA317 cells, which package retrovirus. Viral vectors used in gene therapy are usually generated by a producer cell line that packages a nucleic acid vector into a viral particle. The vectors typically contain the minimal viral sequences required for packaging and subsequent integration into a host (if applicable), other viral sequences being replaced by an expression cassette encoding the protein to be expressed. The missing viral functions are supplied in trans by the packaging cell line. For example, AAV vectors used in gene therapy typically only possess inverted terminal repeat (ITR) sequences from the AAV genome which are required for packaging and integration into the host genome. Viral DNA is packaged in a cell line, which contains a helper plasmid encoding the other AAV genes, namely rep and cap, but lacking ITR sequences. The cell line is also infected with adenovirus as a helper. The helper virus promotes replication of the AAV vector and expression of AAV genes from the helper plasmid. The helper plasmid is not packaged in significant amounts due to a lack of ITR sequences. Contamination with adenovirus can be reduced by, e.g., heat treatment to which adenovirus is more sensitive than AAV. Additionally, AAV can be produced at clinical scale using baculovirus systems (see U.S. Pat. No. 7,479,554).

[0402] In many gene therapy applications, it is desirable that the gene therapy vector be delivered with a high degree of specificity to a particular tissue type. Accordingly, a viral vector can be modified to have specificity for a given cell type by expressing a ligand as a fusion protein with a viral coat protein on the outer surface of the virus. The ligand is chosen to have affinity for a receptor known to be present on the cell type of interest. For example, Han et al., Proc. Natl. Acad. Sci. USA (1995), reported that Moloney murine leukemia virus can be modified to express human heregulin fused to gp70, and the recombinant virus infects certain human breast cancer cells expressing human epidermal growth factor receptor. This principle can be extended to other virus-target cell pairs, in which the target cell expresses a receptor and the virus expresses a fusion protein comprising a ligand for the cell-surface receptor. For example, filamentous phage can be engineered to display antibody fragments (e.g., FAB or Fv) having specific binding affinity for virtually any chosen cellular receptor. Although the above description applies primarily to viral vectors, the same principles can be applied to non-viral vectors. Such vectors can be engineered to contain specific uptake sequences which favor uptake by specific target cells.

[0403] Gene therapy vectors can be delivered in vivo by administration to an individual patient, typically by systemic administration (e.g., intravenous, intraperitoneal, intramuscular, subdermal, or intracranial infusion) or topical application, as described below. Alternatively, vectors can be delivered to cells ex vivo, such as cells explanted from an individual patient (e.g., lymphocytes, bone marrow aspirates, tissue biopsy) or universal donor hematopoietic stem cells, followed by reimplantation of the cells into a patient, usually after selection for cells which have incorporated the vector. In some embodiments, delivery of mRNA in vivo and ex vivo, and RNPs delivery may be utilized.

[0404] Ex vivo cell transfection for diagnostics, research, or for gene therapy (e.g., via re-infusion of the transfected cells into the host organism) is well known to those of skill in the art. In a preferred embodiment, cells are isolated from the subject organism, transfected with an RNA composition, and re-infused back into the subject organism (e.g., patient). Various cell types suitable for ex vivo transfection are well known to those of skill in the art (see, e.g., Freshney, “Culture of Animal Cells, A Manual of Basic Technique and Specialized Applications (6th edition, 2010)) and the references cited therein for a discussion of how to isolate and culture cells from patients).

[0405] Suitable cells include but not limited to eukaryotic and prokaryotic cells and/or cell lines. Non-limiting examples of such cells or cell lines generated from such cells include COS, CHO (e.g., CHO-S, CHO-K1, CHO-DG44, CHO-DUXB11, CHO-DUKX, CHOK1SV), VERO, MDCK, WI38, V79, B14AF28-G3, BHK, HaK, NSO, SP2/0-Ag14, HeLa, HEK293 (e.g., HEK293-F, HEK293-H, HEK293-T), and perC6 cells, any plant cell (differentiated or undifferentiated) as well as insect cells such as Spodoptera frugiperda (Sf), or fungal cells such as Saccharomyces, Pichia and Schizosaccharomyces. In certain embodiments, the cell line is a CHO-K1, MDCK or HEK293 cell line. Additionally, primary cells may be isolated and used ex vivo for reintroduction into the subject to be treated following treatment with the nucleases (e.g. ZFNs or TALENs) or nuclease systems (e.g. CRISPR). Suitable primary cells include peripheral blood mononuclear cells (PBMC), and other blood cell subsets such as, but not limited to, CD4+ T cells or CD8+ T cells. Suitable cells also include stem cells such as, by way of example, embryonic stem cells, induced pluripotent stem cells, hematopoietic stem cells (CD34+), neuronal stem cells and mesenchymal stem cells.

[0406] In one embodiment, stem cells are used in ex vivo procedures for cell transfection and gene therapy. The advantage to using stem cells is that they can be differentiated into other cell types in-vitro or can be introduced into a mammal (such as the donor of the cells) where they will engraft in the bone marrow. Methods for differentiating CD34+ cells in vitro into clinically important immune cell types using cytokines such a GM-CSF, IFN-gamma. and TNF-alpha are known (as a non-limiting example see, Inaba et al., J. Exp. Med. (1992)).

[0407] Stem cells are isolated for transduction and differentiation using known methods. For example, stem cells are isolated from bone marrow cells by panning the bone marrow cells with antibodies which bind unwanted cells, such as CD4+ and CD8+ (T cells), CD45+ (panB cells), GR-1 (granulocytes), and lad (differentiated antigen presenting cells) (as a non-limiting example see Inaba et al., J. Exp. Med. (1992)). Stem cells that have been modified may also be used in some embodiments.

[0408] Notably, any one of the CRISPR nucleases described herein may be suitable for genome editing in post-mitotic cells or any cell which is not actively dividing, e.g., arrested cells. Examples of post-mitotic cells which may be edited using a CRISPR nuclease of the present invention include, but are not limited to, myocyte, a cardiomyocyte, a hepatocyte, an osteocyte and a neuron.

[0409] Vectors (e.g., retroviruses, liposomes, etc.) containing therapeutic RNA compositions can also be administered directly to an organism for transduction of cells in vivo. Alternatively, naked RNA or mRNA can be administered. Administration is by any of the routes normally used for introducing a molecule into ultimate contact with blood or tissue cells including, but not limited to, injection, infusion, topical application and electroporation. Suitable methods of administering such nucleic acids are available and well known to those of skill in the art, and, although more than one route can be used to administer a particular composition, a particular route can often provide a more immediate and more effective reaction than another route.

[0410] Vectors suitable for introduction of transgenes into immune cells (e.g., T-cells) include non-integrating lentivirus vectors. See, for example, U.S. Patent Publication No. 2009/0117617.

[0411] Pharmaceutically acceptable carriers are determined in part by the particular composition being administered, as well as by the particular method used to administer the composition. Accordingly, there is a wide variety of suitable formulations of pharmaceutical compositions available, as described below (see, e.g., Remington's Pharmaceutical Sciences, 17th ed., 1989).

### DNA Repair by Homologous Recombination

[0412] The term “homology-directed repair” or “HDR” refers to a mechanism for repairing DNA damage in cells, for example, during repair of double-stranded and single-stranded breaks in DNA. HDR requires nucleotide sequence homology and uses a “nucleic acid template” (nucleic acid template or donor template used interchangeably herein) to repair the sequence where the double-stranded or single break occurred (e.g., DNA target sequence). This results in the transfer of genetic information from, for example, the nucleic acid template to the DNA target sequence. HDR may result in alteration of the DNA target sequence (e.g., insertion, deletion, mutation) if the nucleic acid template sequence differs from the DNA target sequence and part or all of the nucleic acid template polynucleotide or oligonucleotide is incorporated into the DNA target sequence. In some embodiments, an entire nucleic acid template polynucleotide, a portion of the nucleic acid template polynucleotide, or a copy of the nucleic acid template is integrated at the site of the DNA target sequence.

[0413] The terms “nucleic acid template” and “donor”, refer to a nucleotide sequence that is inserted or copied into a genome. The nucleic acid template comprises a nucleotide sequence, e.g., of one or more nucleotides, that will be added to or will template a change in the target nucleic acid or may be used to modify the target sequence. A nucleic acid template sequence may be of any length, for example between 2 and 10,000 nucleotides in length (or any integer value there between or there above), preferably between about 100 and 1,000 nucleotides in length (or any integer there between), more preferably between about 200 and 500 nucleotides in length. A nucleic acid template may be a single stranded nucleic acid, a double stranded nucleic acid. In some embodiment, the nucleic acid template comprises a nucleotide sequence, e.g., of one or more nucleotides, that corresponds to wild type sequence of the target nucleic acid, e.g., of the target position. In some embodiment, the nucleic acid template comprises a ribonucleotide sequence, e.g., of one or more ribonucleotides, that corresponds to wild type sequence of the target nucleic acid, e.g., of the target position. In some embodiment, the nucleic acid template comprises modified ribonucleotides.

[0414] Insertion of an exogenous sequence (also called a “donor sequence,” donor template” or “donor”), for example, for correction of a mutant gene or for increased expression of a wild-type gene can also be carried out. It will be readily apparent that the donor sequence is typically not identical to the genomic sequence where it is placed. A donor sequence can contain a non-homologous sequence flanked by two regions of homology to allow for efficient HDR at the location of interest. Additionally, donor sequences can comprise a vector molecule containing sequences that are not homologous to the region of interest in cellular chromatin. A donor molecule can contain several, discontinuous regions of homology to cellular chromatin. For example, for targeted insertion of sequences not normally present in a region of interest, said sequences can be present in a donor nucleic acid molecule and flanked by regions of homology to sequence in the region of interest.

[0415] The donor polynucleotide can be DNA or RNA, single-stranded and/or double-stranded and can be introduced into a cell in linear or circular form. See, e.g., U.S. Patent Publication Nos. 2010/0047805; 2011/0281361; 2011/0207221; and 2019/0330620. If introduced in linear form, the ends of the donor sequence can be protected (e.g., from exonucleolytic degradation) by methods known to those of skill in the art. For example, one or more dideoxynucleotide residues are added to the 3′ terminus of a linear molecule and/or self-complementary oligonucleotides are ligated to one or both ends. See, for example, Chang and Wilson, Proc. Natl. Acad. Sci. USA (1987); Nehls et al., Science (1996). Additional methods for protecting exogenous polynucleotides from degradation include, but are not limited to, addition of terminal amino group(s) and the use of modified internucleotide linkages such as, for example, phosphorothioates, phosphoramidates, and O-methyl ribose or deoxyribose residues.

[0416] Accordingly, embodiments of the present invention using a donor template for repair may use a DNA or RNA, single-stranded and/or double-stranded donor template that can be introduced into a cell in linear or circular form. In embodiments of the present invention a gene-editing composition comprises: (1) an RNA molecule comprising a guide sequence to affect a double strand break in a gene prior to repair and (2) a donor RNA template for repair, the RNA molecule comprising the guide sequence is a first RNA molecule and the donor RNA template is a second RNA molecule. In some embodiments, the guide RNA molecule and template RNA molecule are connected as part of a single molecule.

[0417] A donor sequence may also be an oligonucleotide and be used for gene correction or targeted alteration of an endogenous sequence. The oligonucleotide may be introduced to the cell on a vector, may be electroporated into the cell, or may be introduced via other methods known in the art. The oligonucleotide can be used to ‘correct’ a mutated sequence in an endogenous gene (e.g., the sickle mutation in beta globin), or may be used to insert sequences with a desired purpose into an endogenous locus.

[0418] A polynucleotide can be introduced into a cell as part of a vector molecule having additional sequences such as, for example, replication origins, promoters and genes encoding antibiotic resistance. Moreover, donor polynucleotides can be introduced as naked nucleic acid, as nucleic acid complexed with an agent such as a liposome or poloxamer, or can be delivered by recombinant viruses (e.g., adenovirus, AAV, herpesvirus, retrovirus, lentivirus and integrase defective lentivirus (IDLV)).

[0419] The donor is generally inserted so that its expression is driven by the endogenous promoter at the integration site, namely the promoter that drives expression of the endogenous gene into which the donor is inserted. However, it will be apparent that the donor may comprise a promoter and/or enhancer, for example a constitutive promoter or an inducible or tissue specific promoter.

[0420] The donor molecule may be inserted into an endogenous gene such that all, some or none of the endogenous gene is expressed. For example, a transgene as described herein may be inserted into an endogenous locus such that some (N-terminal and/or C-terminal to the transgene) or none of the endogenous sequences are expressed, for example as a fusion with the transgene. In other embodiments, the transgene (e.g., with or without additional coding sequences such as for the endogenous gene) is integrated into any endogenous locus, for example a safe-harbor locus, for example a CCR5 gene, a CXCR4 gene, a PPP1R12c (also known as AAVS1) gene, an albumin gene or a Rosa gene. See, e.g., U.S. Pat. Nos. 7,951,925 and 8,110,379; U.S. Publication Nos. 2008/0159996; 20100/0218264; 2010/0291048; 2012/0017290; 2011/0265198; 2013/0137104; 2013/0122591; 2013/0177983 and 2013/0177960 and U.S. Provisional Application No. 61/823,689).

[0421] When endogenous sequences (endogenous or part of the transgene) are expressed with the transgene, the endogenous sequences may be full-length sequences (wild-type or mutant) or partial sequences. Preferably the endogenous sequences are functional. Non-limiting examples of the function of these full length or partial sequences include increasing the serum half-life of the polypeptide expressed by the transgene (e.g., therapeutic gene) and/or acting as a carrier.

[0422] Furthermore, although not required for expression, exogenous sequences may also include transcriptional or translational regulatory sequences, for example, promoters, enhancers, insulators, internal ribosome entry sites, sequences encoding 2A peptides and/or polyadenylation signals.

[0423] In certain embodiments, the donor molecule comprises a sequence selected from the group consisting of a gene encoding a protein (e.g., a coding sequence encoding a protein that is lacking in the cell or in the individual or an alternate version of a gene encoding a protein), a regulatory sequence and/or a sequence that encodes a structural nucleic acid such as a microRNA or siRNA.

[0424] For the foregoing embodiments, each embodiment disclosed herein is contemplated as being applicable to each of the other disclosed embodiment. For example, it is understood that any of the RNA molecules or compositions of the present invention may be utilized in any of the methods of the present invention.

[0425] As used herein, all headings are simply for organization and are not intended to limit the disclosure in any manner. The content of any individual section may be equally applicable to all sections.

[0426] Additional objects, advantages, and novel features of the present invention will become apparent to one ordinarily skilled in the art upon examination of the following examples, which are not intended to be limiting. Additionally, each of the various embodiments and aspects of the present invention as delineated hereinabove and as claimed in the claims section below finds experimental support in the following examples.

[0427] It is appreciated that certain features of the invention, which are, for clarity, described in the context of separate embodiments, may also be provided in combination in a single embodiment. Conversely, various features of the invention, which are, for brevity, described in the context of a single embodiment, may also be provided separately or in any suitable sub-combination or as suitable in any other described embodiment of the invention. Certain features described in the context of various embodiments are not to be considered essential features of those embodiments, unless the embodiment is inoperative without those elements.

[0428] Generally, the nomenclature used herein, and the laboratory procedures utilized in the present invention include molecular, biochemical, microbiological and recombinant DNA techniques. Such techniques are thoroughly explained in the literature. See, for example, Sambrook et al., “Molecular Cloning: A laboratory Manual” (1989); Ausubel, R. M. (Ed.), “Current Protocols in Molecular Biology” Volumes I-III (1994); Ausubel et al., “Current Protocols in Molecular Biology”, John Wiley and Sons, Baltimore, Maryland (1989); Perbal, “A Practical Guide to Molecular Cloning”, John Wiley & Sons, New York (1988); Watson et al., “Recombinant DNA”, Scientific American Books, New York; Birren et al. (Eds.), “Genome Analysis: A Laboratory Manual Series”, Vols. 1-4, Cold Spring Harbor Laboratory Press, New York (1998); Methodologies as set forth in U.S. Pat. Nos. 4,666,828; 4,683,202; 4,801,531; 5,192,659 and 5,272,057; Cellis, J. E. (Ed.), “Cell Biology: A Laboratory Handbook”, Volumes I-III (1994); Freshney, “Culture of Animal Cells—A Manual of Basic Technique” Third Edition, Wiley-Liss, N. Y. (1994); Coligan J. E. (Ed.), “Current Protocols in Immunology” Volumes I-III (1994); Stites et al. (Eds.), “Basic and Clinical Immunology” (8th Edition), Appleton & Lange, Norwalk, CT (1994); Mishell and Shiigi (Eds.), “Strategies for Protein Purification and Characterization—A Laboratory Course Manual” CSHL Press (1996); Clokie and Kropinski (Eds.), “Bacteriophage Methods and Protocols”, Volume 1: Isolation, Characterization, and Interactions (2009), all of which are incorporated by reference. Other general references are provided throughout this document.

[0429] Examples are provided below to facilitate a more complete understanding of the invention. The following examples illustrate the exemplary modes of making and practicing the invention. However, the scope of the invention is not limited to specific embodiments disclosed in these Examples, which are for purposes of illustration only.

### Experimental Details

[0430] Examples are provided below to facilitate a more complete understanding of the invention. The following examples illustrate the exemplary modes of making and practicing the invention. However, the scope of the invention is not limited to specific embodiments disclosed in these Examples, which are for purposes of illustration only.

[0431] CRISPR repeat (crRNA), trans-activating RNA (tracrRNA), nuclease polypeptide (OMNI), and protospacer adjacent motif (PAM) sequences were predicted from different metagenomic databases of sequences of environmental samples.

### Construction of OMNI Nuclease Polypeptides

[0432] For construction of novel nuclease polypeptides (OMNIs), the open reading frame of several identified OMNIs were codon optimized for human cell line expression. The ORF was cloned into the bacterial expression plasmid pET9a and into the mammalian expression plasmid pmOMNI (Table 4).

Prediction and Construction of sgRNA

[0433] For each OMNI the single guide RNA (sgRNA) was predicted by detection of the CRISPR repeat array sequence and a tracrRNA in the respective bacterial genome. The native pre-mature crRNA and tracrRNA sequences were connected in silico with a tetra-loop ‘gaaa’ sequence and the secondary structure elements of the duplex were predicted using an RNA secondary structure prediction tool.

[0434] The predicted secondary structures of the full duplex RNA elements (crRNA-tracrRNA chimera) was used for identification of possible tracrRNA sequences for the design of a sgRNA. Several possible sgRNA scaffolds versions were constructed by shortening the duplex at the upper stem at different locations (sgRNA designs of all OMNIs are listed in Table 2). Additionally, to overcome potential transcriptional and structural constraints and to assess the plasticity of the sgRNA scaffold in the human cellular environmental context, small changes in the nucleotide sequence of the possible sgRNA were made in some cases (FIG. 1, Table 2). Finally, up to three versions of possible designed scaffolds were synthesized for each OMNI and connected downstream to a 22-nucleotide universal unique spacer sequence (T2, SEQ ID NO: 805) and cloned into a bacterial expressing plasmid under an inducible T7 promoter combined with a U6 promoter for mammalian expression (pShuttleGuide, Table 4).

(SEQ ID NO: 805)
T2-GGAAGAGCAGAGCCTTGGTCTC

### In-Vitro Depletion Assay by TXTL

[0435] Depletion of PAM sequences in vitro was followed as described by Maxwell et al, Methods. 2018. Briefly, linear DNA expressing the OMNI nucleases and an sgRNA under T7 promoter were added to a cell-free transcription-translation in vitro system (TXTL mix, Arbor Bioscience) together with a linear construct expressing T7 polymerase. RNA expression and protein translation by the TXTL mix result in the formation of a ribonucleoprotein (RNP) complex. Since linear DNA was used, Chi6 DNA sequences were added to the TXTL reaction mix to inhibit the exonuclease activity of RecBCD, thereby protecting the linear DNA from degradation. The sgRNA spacer is designed to target a library of plasmids containing the target protospacer (pbPOS T2 library, Table 4) flanked by an 8N randomized set of potential PAM sequences. Depletion of PAM sequences from the library was measured by high-throughput sequencing using PCR to add the necessary adapters and indices to both the cleaved library and to a control library expressing a non-targeting gRNA. Following deep sequencing, the in vitro activity was confirmed by the fraction of the depleted sequences having the same PAM sequence relative to their occurrence in the control, indicating functional DNA cleavage by the OMNI nuclease (FIGS. 3-45, Table 3).

### Activity in Human Cells on Endogenous Genomic Targets

[0436] Editing activity on human genomic targets of each OMNI was assessed by NGS cleavage analysis on HeLa cells co-transfected with the OMNI nuclease and a panel of unique sgRNA molecules each designed to target a different genomic location. To this end, a human optimized OMNI nuclease was cloned into an in-frame-P2A-mCherry expression vector (pmOMNI, Table 4) and each of the sgRNA molecule sequences were cloned into a shuttle-guide vector (pShuttle Guide, Table 4). The sgRNA molecules were designed to contain a 22-nucleotide guide sequence portion that targets a specific location in the human genome (Table 5) according to the corresponding OMNI PAM preference, followed by the sgRNA scaffold sequence as discovered by TXTL (Table 3). At 72 hours post-transfection, cells were harvested. Half of the harvested cells were used for quantification of the OMNI nuclease expression by FACS using mCherry fluorescence as a marker. The rest of the cells were lysed, and their genomic DNA content was extracted and used as a template for PCR amplification of the corresponding genomic targets. Amplicons were subjected to next generation sequencing (NGS) and the resulting reads were then used to calculate the percentage of editing events in their target sites. Short insertions or deletions (indels) around the cut site are the typical outcome of repair of DNA ends following nuclease-induced DNA cleavage. The calculation of % editing was therefore deduced from the fraction of Indels reads relative to the total aligned reads within each amplicon. The results of these experiments are summarized in Table 5.

### Guide Optimization of OMNI-93 by Editing Activity of RNP in U2OS Cells

[0437] Spacer length optimization of OMNI-93 RNP was tested in a mammalian cell context. Synthetic OMNI-93 sgRNAs were synthesized with three 2′-O-methyl 3′-phosphorothioate at the 3′ and 5′ ends (Agilent). RNPs were assembled by mixing 100 uM nuclease with 120 uM of synthetic guide with different spacer lengths (20-25 nucleotides, Table 6, FIG. 46B) of TRAC S119 and 100 uM Cas9 electroporation enhancer (IDT). After a 10 minute incubation at room temperature, the RNP complexes were mixed with 200,000 pre-washed U2OS cells and electroporated using Lonza SE Cell Line 4D-Nucleofector™ X Kit with DN100, according to the manufacture's protocol. 72 h post-electroporation, cells were lysed, and their genomic DNA was extracted and was used as template for PCR amplification of their corresponding genomic targets. Amplicons were subjected to NGS and the resulting sequences were then used calculate the percentage of editing events. As can be seen in FIG. 47 and Table 7, spacers of 20 nucleotides show lower editing levels than spacers of 21-25 nucleotides, indicating a requirement for spacer lengths of at least 21 nucleotides for efficient editing activity.

TABLE 1
OMNI CRISPR nuclease sequences

| | | | SEQ ID NO | | | |
|---|---|---|---|---|---|---|
| | | SEQ ID NO | of DNA | | | Dead nuclease |
| | SEQ ID NO | of DNA | sequence codon | Nickase | Nickase | having |
| | of OMNI | sequence | optimized for | having | having | inactivated |
| “OMNI” | Amino Acid | encoding | expression in | inactivated | inactivated | RuvC and |
| Name | Sequence | OMNI | human cells | RuvC domain | HNH domain | HNH domains |
| OMNI-90 | 1 | 40 | 79 | (D11 or E508 | (E596* or | (D11 or E508 or |
| | | | | or H756 or | H597 or N620) | H756 or D759) |
| | | | | D759) | | and (E596* or |
| | | | | | | H597 or N620) |
| OMNI-91 | 2 | 41 | 80 | (D8 or E509 | (D590* or | (D8 or E509 or |
| | | | | or H728 or | H591 or N614) | H728 or D731) |
| | | | | D731) | | and (D590* or |
| | | | | | | H591 or N614) |
| OMNI-92 | 3 | 42 | 81 | (D9 or E506 | (D587* or | (D9 or E506 or |
| | | | | or H725 or | H588 or N611) | H725 or D728) |
| | | | | D728) | | and (D587* or |
| | | | | | | H588 or N611) |
| OMNI-93 | 4 | 43 | 82 | (D10 or E521 | (D603* or | (D10 or E521 or |
| | | | | or H751 or | H604 or N627) | H751 or D754) |
| | | | | D754) | | and (D603* or |
| | | | | | | H604 or N627) |
| OMNI-94 | 5 | 44 | 83 | (D8 or E512 | (D593* or | (D8 or E512 or |
| | | | | or H735 or | H594 or N617) | H735 or D738) |
| | | | | D738) | | and (D593* or |
| | | | | | | H594 or N617) |
| OMNI-95 | 6 | 45 | 84 | (D10 or E505 | (D592* or | (D10 or E505 or |
| | | | | or H733 or | H593 or N616) | H733 or D736) |
| | | | | D736) | | and (D592* or |
| | | | | | | H593 or N616) |
| OMNI-96 | 7 | 46 | 85 | (D8 or E476 | (D555* or | (D8 or E476 or |
| | | | | or H702 or | H556 or N579) | H702 or D705) |
| | | | | D705) | | and (D555* or |
| | | | | | | H556 or N579) |
| OMNI-97 | 8 | 47 | 86 | (D12 or E521 | (D605* or | (D12 or E521 or |
| | | | | or H755 or | H606 or N629) | H755 or D758) |
| | | | | D758) | | and (D605* or |
| | | | | | | H606 or N629) |
| OMNI-98 | 9 | 48 | 87 | (D8 or E739 | (E863* or | (D8 or E739 or |
| | | | | or H1061 or | H864 or N887) | H1061 or D1064) |
| | | | | D1064) | | and (E863* or |
| | | | | | | H864 or N887) |
| OMNI-99 | 10 | 49 | 88 | (D8 or E678 | (E761* or | (D8 or E678 or |
| | | | | or H926 or | H762 or N785) | H926 or D929) |
| | | | | D929) | | and (E761* or |
| | | | | | | H762 or N785) |
| OMNI-101 | 11 | 50 | 89 | (D8 or E492 | (E578* or | (D8 or E492 or |
| | | | | or H720 or | H579 or N602) | H720 or D723) |
| | | | | D723) | | and (E578* or |
| | | | | | | H579 or N602) |
| OMNI-104 | 13 | 52 | 91 | (D8 or E492 | (E578* or | (D8 or E492 or |
| | | | | or H720 or | H579 or N602) | H720 or D723) |
| | | | | D723) | | and (E578* or |
| | | | | | | H579 or N602) |
| OMNI-105 | 14 | 53 | 92 | (D8 or E492 | (E578* or | (D8 or E492 or |
| | | | | or H720 or | H579 or N602) | H720 or D723) |
| | | | | D723) | | and (E578* or |
| | | | | | | H579 or N602) |
| OMNI-106 | 15 | 54 | 93 | (D11 or E757 | (D836* or | (D11 or E757 or |
| | | | | or H993 or | H837 or N860) | H993 or D996) |
| | | | | D996) | | and (D836* or |
| | | | | | | H837 or N860) |
| OMNI-107 | 16 | 55 | 94 | (D9 or E765 | (D849* or | (D9 or E765 or |
| | | | | or H981 or | H850 or N873) | H981 or D984) |
| | | | | D984) | | and (D849* or |
| | | | | | | H850 or N873) |
| OMNI-109 | 17 | 56 | 95 | (D13 or E792 | (D872* or | (D13 or E792 or |
| | | | | or H1004 or | H873 or N896) | H1004 or D1007) |
| | | | | D1007) | | and (D872* or |
| | | | | | | H873 or N896) |
| OMNI-110 | 18 | 57 | 96 | (D9 or E743 | (E851* or | (D9 or E743 or |
| | | | | or H1051 or | H852 or N875) | H1051 or D1054) |
| | | | | D1054) | | and (E851* or |
| | | | | | | H852 or N875) |
| OMNI-113 | 19 | 58 | 97 | (D9 or E821 | (D927* or | (D9 or E821 or |
| | | | | or H1059 or | H928 or N951) | H1059 or D1062) |
| | | | | D1062) | | and (D927* or |
| | | | | | | H928 or N951) |
| OMNI-114 | 20 | 59 | 98 | (D10 or E534 | (D610* or | (D10 or E534 or |
| | | | | or H781 or | H611 or −633) | H781 or D784) |
| | | | | D784) | | and (D610* or |
| | | | | | | H611 or −633) |
| OMNI-116 | 21 | 60 | 99 | (D10 or E534 | (D610* or | (D10 or E534 or |
| | | | | or H781 or | H611 or −633) | H781 or D784) |
| | | | | D784) | | and (D610* or |
| | | | | | | H611 or −633) |
| OMNI-118 | 22 | 61 | 100 | (D8 or E727 | (E833* or | (D8 or E727 or |
| | | | | or H1011 or | H834 or N857) | H1011 or D1014) |
| | | | | D1014) | | and (E833* or |
| | | | | | | H834 or N857) |
| OMNI-119 | 23 | 62 | 101 | (D11 or E742 | (E871* or | (D11 or E742 or |
| | | | | or H1066 or | H872 or N895) | H1066 or D1069) |
| | | | | D1069) | | and (E871* or |
| | | | | | | H872 or N895) |
| OMNI-120 | 24 | 63 | 102 | (D11 or E799 | (D886* or | (D11 or E799 or |
| | | | | or H1021 or | H887 or N911) | H1021 or D1024) |
| | | | | D1024) | | and (D886* or |
| | | | | | | H887 or N911) |
| OMNI-121 | 25 | 64 | 103 | (D8 or E750 | (E875* or | (D8 or E750 or |
| | | | | or H1075 or | H876 or N899) | H1075 or D1078) |
| | | | | D1078) | | and (E875* or |
| | | | | | | H876 or N899) |
| OMNI-122 | 26 | 65 | 104 | (D8 or E682 | (E765* or | (D8 or E682 or |
| | | | | or H932 or | H766 or N789) | H932 or D935) |
| | | | | D935) | | and (E765* or |
| | | | | | | H766 or N789) |
| OMNI-123 | 27 | 66 | 105 | (D9 or E507 | (D588* or | (D9 or E507 or |
| | | | | or H726 or | H589 or N612) | H726 or D729) |
| | | | | D729) | | and (D588* or |
| | | | | | | H589 or N612) |
| OMNI-125 | 28 | 67 | 106 | (D8 or E682 | (E765* or | (D8 or E682 or |
| | | | | or H932 or | H766 or N789) | H932 or D935) |
| | | | | D935) | | and (E765* or |
| | | | | | | H766 or N789) |
| OMNI-126 | 29 | 68 | 107 | (D13 or E595 | (E673* or | (D13 or E595 or |
| | | | | or H843 or | H674 or N697) | H843 or D846) |
| | | | | D846) | | and (E673* or |
| | | | | | | H674 or N697) |
| OMNI-128 | 30 | 69 | 108 | (D8 or E554 | (E633* or | (D8 or E554 or |
| | | | | or H814 or | H634 or N657) | H814 or D817) |
| | | | | D817) | | and (E633* or |
| | | | | | | H634 or N657) |
| OMNI-129 | 31 | 70 | 109 | (D8 or E517 | (D597* or | (D8 or E517 or |
| | | | | or H735 or | H598 or N621) | H735 or D738) |
| | | | | D738) | | and (D597* or |
| | | | | | | H598 or N621) |
| OMNI-131 | 32 | 71 | 110 | (D10 or E771 | (D851* or | (D10 or E771 or |
| | | | | or H983 or | H852 or N875) | H983 or D986) |
| | | | | D986) | | and (D851* or |
| | | | | | | H852 or N875) |
| OMNI-132 | 33 | 72 | 111 | (D12 or E776 | (D856* or | (D12 or E776 or |
| | | | | or H988 or | H857 or N880) | H988 or D991) |
| | | | | D991) | | and (D856* or |
| | | | | | | H857 or N880) |
| OMNI-133 | 34 | 73 | 112 | (D7 or E788 | (D869* or | (D7 or E788 or |
| | | | | or H1002 or | H870 or N894) | H1002 or D1005) |
| | | | | D1005) | | and (D869* or |
| | | | | | | H870 or N894) |
| OMNI-134 | 35 | 74 | 113 | (D9 or E821 | (D927* or | (D9 or E821 or |
| | | | | or H1059 or | H928 or N951) | H1059 or D1062) |
| | | | | D1062) | | and (D927* or |
| | | | | | | H928 or N951) |
| OMNI-135 | 36 | 75 | 114 | (D7 or E778 | (D859* or | (D7 or E778 or |
| | | | | or H992 or | H860 or N884) | H992 or D995) |
| | | | | D995) | | and (D859* or |
| | | | | | | H860 or N884) |
| OMNI-136 | 37 | 76 | 115 | (D8 or E507 | (D588* or | (D8 or E507 or |
| | | | | or H730 or | H589 or N612) | H730 or D733) |
| | | | | D733) | | and (D588* or |
| | | | | | | H589 or N612) |
| OMNI-137 | 38 | 77 | 116 | (D8 or E540 | (E625* or | (D8 or E540 or |
| | | | | or H776 or | H626 or N649) | H776 or D779) |
| | | | | D779) | | and (E625* or |
| | | | | | | H626 or N649) |
| OMNI-138 | 39 | 78 | 117 | (D8 or E508 | (D589* or | (D8 or E508 or |
| | | | | or H727 or | H590 or N613) | H727 or D730) |
| | | | | D730) | | and (D589* or |
| | | | | | | H590 or N613) |

Table 1. OMNI nuclease sequences: Table 1 lists the OMNI name, its corresponding nuclease protein sequence, its DNA sequence, its human optimized DNA sequence, alternative positions to be substituted to generate a nickase having an inactivated RuvC domain, alternative positions to be substituted to generate a nickase having an inactivated HNH domain, and alternative positions to be substituted to generate a catalytically dead nuclease having inactivated RuvC and HNH domains. Substitution to any other amino acid is permissible for each of the amino acid positions indicated in columns 5-7, except if followed by an asterisk, which indicates that any substitution other than aspartic acid (D) to glutamic acid (E) or glutamic acid (E) to aspartic acid (D) results in inactivation.

SUPPLEMENTAL TABLE 1
OMNI Domains

| | OMNI-90 | OMNI-91 | OMNI-92 | OMNI-93 | OMNI-94 | OMNI-95 | OMNI-96 | OMNI-97 |
|---|---|---|---|---|---|---|---|---|
| Domain A | 1-43 | 1-40 | 1-41 | 1-41 | 1-40 | 1-37 | 1-36 | 1-40 |
| Domain B | 44-87 | 41-84 | 42-85 | 42-85 | 41-84 | 38-74 | 37-75 | 41-86 |
| Domain C | 88-131 | 85-129 | 86-130 | 86-131 | 85-129 | 75-113 | 76-112 | 87-131 |
| Domain D | 132-149 | 130-142 | 131-142 | 132-149 | 130-142 | 114-125 | 113-124 | 132-149 |
| Domain E | 150-244 | 143-251 | 143-251 | 150-266 | 143-251 | 126-256 | 125-234 | 150-266 |
| Domain F | 245-461 | 252-463 | 252-464 | 267-478 | 252-469 | 257-461 | 235-428 | 267-477 |
| Domain G | 462-510 | 464-511 | 465-508 | 479-523 | 470-514 | 462-507 | 429-478 | 478-523 |
| Domain H | 511-666 | 512-656 | 509-653 | 524-677 | 515-663 | 508-666 | 479-633 | 524-678 |
| Domain I | 667-813 | 657-830 | 654-825 | 678-812 | 664-824 | 667-810 | 634-779 | 679-810 |
| Domain J | 814-1060 | 831-1084 | 826-1077 | 813-1038 | 825-1075 | 811-1085 | 780-1057 | 811-1036 |

| | OMNI-98 | OMNI-99 | OMNI-101 | OMNI-104 | OMNI-105 | OMNI-106 | OMNI-107 | OMNI-108 |
|---|---|---|---|---|---|---|---|---|
| Domain A | 1-40 | 1-41 | 1-40 | 1-40 | 1-40 | 1-44 | 1-42 | 1-71 |
| Domain B | 41-90 | 42-91 | 41-85 | 41-85 | 41-85 | 45-82 | 43-80 | 72-109 |
| Domain C | 91-193 | 92-137 | 86-125 | 86-125 | 86-125 | 83-160 | 81-156 | 110-185 |
| Domain D | 194-289 | 138-280 | 126-137 | 126-137 | 126-137 | 161-303 | 157-303 | 186-347 |
| Domain E | 290-425 | 281-388 | 138-227 | 138-227 | 138-227 | 304-505 | 304-504 | 348-552 |
| Domain F | 426-691 | 389-630 | 228-444 | 228-444 | 228-444 | 506-708 | 505-717 | 553-765 |
| Domain G | 692-741 | 631-680 | 445-494 | 445-494 | 445-494 | 709-759 | 718-767 | 766-816 |
| Domain H | 742-944 | 681-831 | 495-649 | 495-649 | 495-649 | 760-904 | 768-917 | 817-973 |
| Domain I | 945-1161 | 832-1020 | 650-817 | 650-817 | 650-817 | 905-1072 | 918-1054 | 974-1119 |
| Domain J | 1162-1485 | 1021-1359 | 818-1108 | 818-1108 | 818-1108 | 1073-1347 | 1055-1329 | 1120-1406 |

| | OMNI-109 | OMNI-110 | OMNI-114 | OMNI-116 | OMNI-118 | OMNI-119 | OMNI-120 | OMNI-121 |
|---|---|---|---|---|---|---|---|---|
| Domain A | 1-46 | 1-46 | 1-49 | 1-49 | 1-41 | 1-47 | 1-44 | 1-48 |
| Domain B | 47-84 | 46-95 | 50-86 | 50-86 | 42-87 | 48-97 | 45-82 | 49-98 |
| Domain C | 85-159 | 96-182 | 87-131 | 87-131 | 88-171 | 98-193 | 83-160 | 99-194 |
| Domain D | 160-311 | 183-270 | 132-143 | 132-149 | 172-194 | 194-287 | 161-314 | 195-288 |
| Domain E | 312-528 | 271-405 | 144-244 | 150-243 | 195-298 | 288-422 | 315-534 | 289-418 |
| Domain F | 529-743 | 406-695 | 245-486 | 244-486 | 299-649 | 423-694 | 535-750 | 419-702 |
| Domain G | 744-794 | 696-745 | 487-536 | 487-536 | 650-729 | 695-744 | 751-801 | 703-752 |
| Domain H | 795-939 | 746-932 | 537-681 | 537-681 | 730-949 | 745-952 | 802-957 | 753-956 |
| Domain I | 940-1089 | 933-1152 | 682-882 | 682-882 | 950-1107 | 953-1184 | 958-1111 | 957-1189 |
| Domain J | 1090-1363 | 1153-1499 | 883-1140 | 883-1140 | 1108-1423 | 1185-1513 | 1112-1383 | 1190-1540 |
| | OMNI-122 | OMNI-123 | OMNI-125 | OMNI-126 | OMNI-128 | OMNI-129 | OMNI-131 | OMNI-132 |
| Domain A | 1-41 | 1-41 | 1-41 | 1-44 | 1-40 | 1-40 | 1-43 | 1-45 |
| Domain B | 42-91 | 42-85 | 42-91 | 45-91 | 41-90 | 41-84 | 44-81 | 46-83 |
| Domain C | 92-137 | 86-130 | 92-137 | 92-164 | 91-132 | 85-131 | 82-162 | 84-158 |
| Domain D | 138-279 | 131-142 | 138-279 | 165-179 | 133-144 | 132-145 | 163-307 | 159-302 |
| Domain E | 280-387 | 143-251 | 280-387 | 180-265 | 145-260 | 146-260 | 308-515 | 303-515 |
| Domain F | 388-634 | 252-463 | 388-634 | 266-533 | 261-503 | 261-469 | 516-722 | 516-727 |
| Domain G | 635-684 | 464-509 | 635-684 | 534-597 | 504-556 | 470-519 | 723-773 | 728-778 |
| Domain H | 685-837 | 510-654 | 685-837 | 598-777 | 557-707 | 520-666 | 774-919 | 779-923 |
| Domain I | 838-1032 | 655-826 | 838-1031 | 778-938 | 708-914 | 667-841 | 920-1064 | 924-1068 |
| Domain J | 1033- | 827-1079 | 1032-1365 | 939-1225 | 915-1255 | 842-1090 | 1065-1337 | 1069-1348 |

| | OMNI-133 | OMNI-134 | OMNI-135 | OMNI-136 | OMNI-137 | OMNI-138 |
|---|---|---|---|---|---|---|
| Domain A | 1-40 | 1-41 | 1-40 | 1-40 | 1-36 | 1-40 |
| Domain B | 41-78 | 42-79 | 41-78 | 41-84 | 37-82 | 41-84 |
| Domain C | 79-153 | 80-153 | 79-153 | 85-129 | 83-129 | 85-131 |
| Domain D | 154-301 | 154-328 | 154-301 | 130-142 | 130-140 | 132-146 |
| Domain E | 302-510 | 329-557 | 302-510 | 143-251 | 141-282 | 147-255 |
| Domain F | 511-739 | 558-772 | 511-729 | 252-464 | 283-493 | 256-462 |
| Domain G | 740-790 | 773-823 | 730-780 | 465-509 | 494-542 | 463-510 |
| Domain H | 791-938 | 824-993 | 781-928 | 510-658 | 543-695 | 511-655 |
| Domain I | 939-1083 | 994-1131 | 929-1073 | 659-831 | 696-899 | 656-827 |
| Domain J | 1084-1352 | 1132-1463 | 1074-1342 | 832-1085 | 900-1200 | 828-1080 |

Supplemental Table 1. OMNI Domains: Supplemental Table 1 lists the amino acid range of each identified domain for OMNI CRISPR nuclease. For example, Domain G of OMNI-90 is identified by amino acids 462-510 of SEQ ID NO: 1. The listed amino acid ranges are based on a preferred analysis of a local alignment generated using the Smith-Waterman algorithm, however, the beginning or end of each domain range may increase or decrease by up to five amino acids.

TABLE 2
OMNI Guide RNA and Scaffold RNA Sequences

| | | OMNI-90 with sgRNA 1 | OMNI-91 with sgRNA 2 |
|---|---|---|---|
| crRNA:tracr | crRNA | GUUGCAGGUUGACCGG (SEQ | GUUGUAGUCCCCUCGUAGU (SEQ |
| RNA duplex | (Repeat) | ID NO: 118) | ID NO: 136) |
| V1 | Partial | GUUGCAGGUUGACCG (SEQ | GUUGUAGUCCCCUCG (SEQ ID |
| | crRNA 1 | ID NO: 119) | NO: 137) |
| | Partial | GUUGCAGGUUGA (SEQ ID | GUUGUAGUCCCC (SEQ ID NO: |
| | crRNA 2 | NO: 120) | 138) |
| | Partial | GUUGCAGGUU (SEQ ID NO: | GUUGUAGUCC (SEQ ID NO: 139) |
| | crRNA 3 | 121) | |
| | tracrRNA | GCGGUCAACCUGCUAAC | ACUAUCAGGUCACUACAAU (SEQ |
| | (Antirepeat) | (SEQ ID NO: 122) | ID NO: 140) |
| | Partial | CGGUCAACCUGCUAAC (SEQ | UCAGGUCACUACAAU (SEQ ID |
| | tracrRNA 1 | ID NO: 123) | NO: 141) |
| | Partial | UCAACCUGCUAAC (SEQ ID | GGUCACUACAAU (SEQ ID NO: |
| | tracrRNA 2 | NO: 124) | 142) |
| | Partial | AACCUGCUAAC (SEQ ID NO: | UCACUACAAU (SEQ ID NO: 143) |
| | tracrRNA 3 | 125) | |
| tracrRNA | tracrRNA | AAGGAAACCUUUAGUUUCC | AAAGUAGAACACUGAAAAGCUC |
| sequences | Portion 1 | (SEQ ID NO: 126) | UGACGGCCCACUUUCCGUGGGU |
| | | | CGUCAUCUUUUUU (SEQ ID NO: |
| | | | 144) |
| | tracrRNA | GGAAACCUUUAGUUUCC | Not listed |
| | Portion 1- | (SEQ ID NO: 127) | |
| | partial | | |
| | tracrRNA | Not listed | AAAGUAGAACACUGAAAAGCUC |
| | Portion 1- | | UGACGGCCCACUUUCCGUGGGU |
| | polyT | | CGUCAUC (SEQ ID NO: 145) |
| | tracrRNA | GCAAAAUGCUUUUAUAUUC | Not listed |
| | Portion 2 | GUUGAGAUUUUUGCGUGAA | |
| | | UAUAGAUAGCACACAAUGC | |
| | | AAA (SEQ ID NO: 128) | |
| | tracrRNA | GGGAAAGCUACGGCUUUCCC | Not listed |
| | Portion 3 | CCUUUUUUUU (SEQ ID NO: | |
| | | 129) | |
| | tracrRNA | GGGAAAGCUACGGCUUUCCC | Not listed |
| | Portion 3- | CC (SEQ ID NO: 130) | |
| | polyT | | |
| sgRNA | sgRNA V1 | GUUGCAGGUUGACCGGgaaaG | GUUGUAGUCCCCUCGUAGUgaaaA |
| Versions | | CGGUCAACCUGCUAACAAGG | CUAUCAGGUCACUACAAUAAAG |
| | | AAACCUUUAGUUUCCGCAAA | UAGAACACUGAAAAGCUCUGAC |
| | | AUGCUUUUAUAUUCGUUGA | GGCCCACUUUCCGUGGGUCGUC |
| | | GAUUUUUGCGUGAAUAUAG | AUCUUUUUU (SEQ ID NO: 146) |
| | | AUAGCACACAAUGCAAAGG | |
| | | GAAAGCUACGGCUUUCCCCC | |
| | | UUUUUUUU (SEQ ID NO: 131) | |
| | sgRNA V2 | GUUGCAGGUUGACCGGgaaaG | Not listed |
| | | CGGUCAACCUGCUAACAAGG | |
| | | AAACCUUUAGUUUCCGCAAU | |
| | | AUGCUUUAAUAUUCGUUGA | |
| | | GAUUAUUGCGUGAAUAUAG | |
| | | AUAGCACACAAUGCAAAGG | |
| | | GAAAGCUACGGCUUUCCCCC | |
| | | UUUUUUUU (SEQ ID NO: 132) | |
| | sgRNA V2 | GCAAUAUGCUUUAAUAUUC | Not listed |
| | Modified | GUUGAGAUUAUUGCGUGAA | |
| | tracrRNA | UAUAGAUAGCACACAAUGC | |
| | Portion 2 | AAA (SEQ ID NO: 133) | |
| | sgRNA V3 | GUUGCAGGUUGACCGGgaaaG | Not listed |
| | | CGGUCAACCUGCUAACAAGG | |
| | | AAACCUUUAGUUUCCGCAAU | |
| | | AUGCUUUAAUAUUCGUUGA | |
| | | GAUUAUUGCGUGAAUAUAG | |
| | | AUAGCACACAAUGCUUUUU | |
| | | (SEQ ID NO: 134) | |
| | sgRNA V4 | GUUGCAGGUUGACCGGgaaaG | Not listed |
| | | CGGUCAACCUGCUAACAAGG | |
| | | AAACCUUUAGUUUCCGCAAU | |
| | | AUGCUUUAAUAUUCGUUGA | |
| | | GAUUAUUGCGUGAAUAUAG | |
| | | AUUUUU (SEQ ID NO: 135) | |
| | | OMNI-92 with sgRNA 3 | OMNI-93 with sgRNA 4 |
| crRNA:tracr | crRNA | GUUGUAGUUCCCUGAUCGU | GUUUUAGUACUCUGUUG (SEQ ID |
| RNA duplex | (Repeat) | (SEQ ID NO: 147) | NO: 163) |
| V1 | Partial | GUUGUAGUUCCCUGA (SEQ | GUUUUAGUACUCUGU (SEQ ID |
| | crRNA 1 | ID NO: 148) | NO: 164) |
| | Partial | GUUGUAGUUCCC (SEQ ID | GUUUUAGUACUC (SEQ ID NO: |
| | crRNA 2 | NO: 149) | 165) |
| | Partial | GUUGUAGUUC (SEQ ID NO: | GUUUUAGUAC (SEQ ID NO: 166) |
| | crRNA 3 | 150) | |
| | tracrRNA | ACGAUCAGGUUGCUACAAU | CAACAAUAGUUCUAAGAU (SEQ |
| | (Antirepeat) | (SEQ ID NO: 151) | ID NO: 167) |
| | Partial | UCAGGUUGCUACAAU (SEQ | ACAAUAGUUCUAAGAU (SEQ ID |
| | tracrRNA 1 | ID NO: 152) | NO: 168) |
| | Partial | GGUUGCUACAAU (SEQ ID | UAGUUCUAAGAU (SEQ ID NO: |
| | tracrRNA 2 | NO: 153) | 169) |
| | Partial | UUGCUACAAU (SEQ ID NO: | GUUCUAAGAU (SEQ ID NO: 170) |
| | tracrRNA 3 | 154) | |
| tracrRNA | tracrRNA | AAGGUAGUACACC (SEQ ID | AAGGCUAUUUAUGCCGUAGGGU |
| sequences | Portion 1 | NO: 155) | AU (SEQ ID NO: 171) |
| | tracrRNA | GGUAGUACACC (SEQ ID NO: | GGCUAUUUAUGCC (SEQ ID NO: |
| | Portion 1- | 156) | 172) |
| | partial | | |
| | tracrRNA | GAAGAGCUCUAACGCCCCGU | GGUGGUAUCCCUUUAAUCCACC |
| | Portion 2 | UUUGCGGGGCGUUAUCUCU | UU (SEQ ID NO: 173) |
| | | UUUUUU (SEQ ID NO: 157) | |
| | tracrRNA | GAAGAGCUCUAACGCCCCGU | Not listed |
| | Portion 2- | UUUGCGGGGCGUUAUCUC | |
| | polyT | (SEQ ID NO: 158) | |
| | tracrRNA | Not listed | UAAGCCAUUGCUUAUGCAAUGG |
| | Portion 3 | | CUUAUCUAUAUUUUUU (SEQ ID |
| | | | NO: 174) |
| | tracrRNA | Not listed | UAAGCCAUUGCUUAUGCAAUGG |
| | Portion 3- | | CUUAUCUAUA (SEQ ID NO: 175) |
| | polyT | | |
| sgRNA | sgRNA V1 | GUUGUAGUUCCCUGAUCGUg | GUUUUAGUACUCUGUUGgaaaCA |
| Versions | | aaaACGAUCAGGUUGCUACAA | ACAAUAGUUCUAAGAUAAGGCU |
| | | UAAGGUAGUACACCGAAGA | AUUUAUGCCGUAGGGUAUGGUG |
| | | GCUCUAACGCCCCGUUUUGC | GUAUCCCUUUAAUCCACCUUUA |
| | | GGGGCGUUAUCUCUUUUUU | AGCCAUUGCUUAUGCAAUGGCU |
| | | U (SEQ ID NO: 159) | UAUCUAUAUUUUUU (SEQ ID NO: |
| | | | 176) |
| | sgRNA V2 | GUUGUAGUUCCCUGAUCGUg | GUCUUAGUACUCUGUUGgaaaCA |
| | | aaaACGAUCAGGUUGCUACAA | ACAAUAGUUCUAAGAUAAGGCU |
| | | UAAGGUAGUACACCGAAGA | AUUUAUGCCGUAGGGUAUGGUG |
| | | GCUCUAACGCCCCGUAUUGC | GUAUCCCUUUAAUCCACCUUUA |
| | | GGGGCGUUAUCUCUUUUUU | AGCCAUUGCUUAUGCAAUGGCU |
| | | U (SEQ ID NO: 160) | UAUCUAUAUUUUUU (SEQ ID NO: |
| | | | 177) |
| | sgRNA V2 | Not listed | GUCUUAGUACUCUGUUG (SEQ ID |
| | crRNA | | NO: 178) |
| | (Repeat) | | |
| | sgRNA V2 | Not listed | GUCUUAGUACUCUGU (SEQ ID |
| | Partial | | NO: 179) |
| | crRNA 1 | | |
| | sgRNA V2 | Not listed | GUCUUAGUACUC (SEQ ID NO: |
| | Partial | | 180) |
| | crRNA 2 | | |
| | sgRNA V2 | Not listed | GUCUUAGUAC (SEQ ID NO: 181) |
| | Partial | | |
| | crRNA 3 | | |
| | sgRNA V2 | GAAGAGCUCUAACGCCCCGU | Not listed |
| | Modified | AUUGCGGGGCGUUAUCUCU | |
| | tracrRNA | UUUUUU (SEQ ID NO: 161) | |
| | Portion 2 | | |
| | sgRNA V2 | GAAGAGCUCUAACGCCCCGU | Not listed |
| | Modified | AUUGCGGGGCGUUAUCUC | |
| | tracrRNA | (SEQ ID NO: 162) | |
| | polyT | | |
| | | OMNI-94 with sgRNA 5 | OMNI-95 with sgRNA 6 |
| crRNA:tracr | crRNA | GUUGUAGCUCCCUGUUAAU | AUUUUAGUACCUGGAGAAA |
| RNA duplex | (Repeat) | (SEQ ID NO: 182) | (SEQ ID NO: 198) |
| V1 | Partial | GUUGUAGCUCCCUGU (SEQ | AUUUUAGUACCUGGA (SEQ ID |
| | crRNA 1 | ID NO: 183) | NO: 199) |
| | Partial | GUUGUAGCUCCC (SEQ ID NO: | AUUUUAGUACCU (SEQ ID NO: |
| | crRNA 2 | 184) | 200) |
| | Partial | GUUGUAGCUC (SEQ ID NO: | AUUUUAGUAC (SEQ ID NO: 201) |
| | crRNA 3 | 185) | |
| | tracrRNA | ACUAACAGGUUACUACAAU | UUUCUUCAGACCUACUAAAA |
| | (Antirepeat) | (SEQ ID NO: 186) | (SEQ ID NO: 202) |
| | Partial | ACAGGUUACUACAAU (SEQ | UUCAGACCUACUAAAA (SEQ ID |
| | tracrRNA 1 | ID NO: 187) | NO: 203) |
| | Partial | GGUUACUACAAU (SEQ ID | AGACCUACUAAAA (SEQ ID NO: |
| | tracrRNA 2 | NO: 188) | 204) |
| | Partial | UUACUACAAU (SEQ ID NO: | CCUACUAAAA (SEQ ID NO: 205) |
| | tracrRNA 3 | 189) | |
| tracrRNA | tracrRNA | AAGGUCUUAGGACCGC (SEQ | CAAGGCUUUAUGCCGAAAGUUU |
| sequences | Portion 1 | ID NO: 190) | UUUUGAUUUGAAUUGAAUGAGU |
| | | | U (SEQ ID NO: 206) |
| | tracrRNA | GGUCUUAGGACC (SEQ ID | AAGGCUUUAUGCCGAAAGUUUU |
| | Portion 1- | NO: 191) | (SEQ ID NO: 207) |
| | partial | | |
| | tracrRNA | AAAGCUCUAUCGCCCUACAU | GAAAGAGGAUGCCGACGGGUGU |
| | Portion 2 | CCGUAGGGCGAUAUCUUUU | CCUCUUUUUUU (SEQ ID NO: 208) |
| | | UAUACAUUUUUU (SEQ ID | |
| | | NO: 192) | |
| | tracrRNA | AAAGCUCUAUCGCCCUACAU | GAAAGAGGAUGCCGACGGGUGU |
| | Portion 2- | CCGUAGGGCGAUAUCUUUU | CCUC (SEQ ID NO: 209) |
| | polyT | UAUACA (SEQ ID NO: 193) | |
| sgRNA | sgRNA V1 | GUUGUAGCUCCCUGUUAAUg | AUUUUAGUACCUGGAGAAAgaaa |
| Versions | | aaaACUAACAGGUUACUACAA | UUUCUUCAGACCUACUAAAACA |
| | | UAAGGUCUUAGGACCGCAA | AGGCUUUAUGCCGAAAGUUUUU |
| | | AGCUCUAUCGCCCUACAUCC | UUGAUUUGAAUUGAAUGAGUUG |
| | | GUAGGGCGAUAUCUUUUUA | AAAGAGGAUGCCGACGGGUGUC |
| | | UACAUUUUUU (SEQ ID NO: | CUCUUUUUUU (SEQ ID NO: 210) |
| | | 194) | |
| | sgRNA V2 | GUUGUAGCUCCCUGUUAAUg | AUUUUAGUACCUGGAGAAAgaaa |
| | | aaaACUAACAGGUUACUACAA | UUUCUUCAGACCUACUAAAACA |
| | | UAAGGUCUUAGGACCGCAA | AGGCUUUAUGCCGAAAGUAUUU |
| | | AGCUCUAUCGCCCUACAUCC | AUGAUUUGAAUUGAAUGAGUUG |
| | | GUAGGGCGAUAUCUAUUUA | AAAGAGGAUGCCGACGGGUGUC |
| | | UACAUUUUUU (SEQ ID NO: | CUCUUUUUUU (SEQ ID NO: 211) |
| | | 195) | |
| | sgRNA V2 | Not listed | CAAGGCUUUAUGCCGAAAGUAU |
| | Modified | | UUAUGAUUUGAAUUGAAUGAGU |
| | tracrRNA | | U (SEQ ID NO: 212) |
| | Portion 1 | | |
| | sgRNA V2 | AAAGCUCUAUCGCCCUACAU | Not listed |
| | Modified | CCGUAGGGCGAUAUCUAUU | |
| | tracrRNA | UAUACAUUUUUU (SEQ ID | |
| | Portion 2 | NO: 196) | |
| | sgRNA V2 | AAAGCUCUAUCGCCCUACAU | Not listed |
| | Modified | CCGUAGGGCGAUAUCUAUU | |
| | tracrRNA | UAUACA (SEQ ID NO: 197) | |
| | polyT | | |
| | | OMNI-96 with sgRNA 7 | OMNI-97 with sgRNA 8 |
| crRNA:tracr | crRNA | GUUUUGCUACCCUAAAUUA | GUUUUGGGCCUCUGAUGG (SEQ |
| RNA duplex | (Repeat) | (SEQ ID NO: 213) | ID NO: 235) |
| V1 | Partial | GUUUUGCUACCCUAA (SEQ | GUUUUGGGCCUCUGA (SEQ ID |
| | crRNA 1 | ID NO: 214) | NO: 236) |
| | Partial | GUUUUGCUACCC (SEQ ID NO: | GUUUUGGGCCUC (SEQ ID NO: |
| | crRNA 2 | 215) | 237) |
| | Partial | GUUUUGCUAC (SEQ ID NO: | GUUUUGGGCC (SEQ ID NO: 238) |
| | crRNA 3 | 216) | |
| | tracrRNA | AAUAUUAGGACCUAGCAAA | CCAUCAGAGACCUGAGAU (SEQ |
| | (Antirepeat) | AC (SEQ ID NO: 217) | ID NO: 239) |
| | Partial | UUAGGACCUAGCAAAAC | UCAGAGACCUGAGAU (SEQ ID |
| | tracrRNA 1 | (SEQ ID NO: 218) | NO: 240) |
| | Partial | GGACCUAGCAAAAC (SEQ ID | GAGACCUGAGAU (SEQ ID NO: |
| | tracrRNA 2 | NO: 219) | 241) |
| | Partial | CCUAGCAAAAC (SEQ ID NO: | GACCUGAGAU (SEQ ID NO: 242) |
| | tracrRNA 3 | 220) | |
| tracrRNA | tracrRNA | AAGGCUUUAUGCC (SEQ ID | AAGGCUUUAUGCC (SEQ ID NO: |
| sequences | Portion 1 | NO: 221) | 243) |
| | tracrRNA | GGCUUUAUGCC (SEQ ID NO: | GGCUUUAUGCC (SEQ ID NO: 244) |
| | Portion 1- | 222) | |
| | partial | | |
| | tracrRNA | Not listed | Not listed |
| | Portion 1- | | |
| | polyT | | |
| | tracrRNA | GAAAUCGGAGUCGACGGGC | GUAGGGUAUGGCGGUAACCCGG |
| | Portion 2 | UCCUUUUUU (SEQ ID NO: | AGUAUUCCGAAUCCGCUUUUUC |
| | | 223) | UUUGC (SEQ ID NO: 245) |
| | tracrRNA | GAAAUCGGAGUCGACGGGC | Not listed |
| | Portion 2- | UCC (SEQ ID NO: 224) | |
| | polyT | | |
| | tracrRNA | Not listed | CUGUAAAUACAGUAUAACAUAU |
| | Portion 3 | | UAUUUCGUCCUUUUUU (SEQ ID |
| | | | NO: 246) |
| | tracrRNA | Not listed | CUGUAAAUACAGUAUAACAUAU |
| | Portion 3- | | UAUUUCGUCC (SEQ ID NO: 247) |
| | polyT | | |
| sgRNA | sgRNA V1 | GUUUUGCUACCCUAAAUUAg | GUUUUGGGCCUCUGAUGGgaaaCC |
| Versions | | aaaAAUAUUAGGACCUAGCAA | AUCAGAGACCUGAGAUAAGGCU |
| | | AACAAGGCUUUAUGCCGAA | UUAUGCCGUAGGGUAUGGCGGU |
| | | AUCGGAGUCGACGGGCUCCU | AACCCGGAGUAUUCCGAAUCCG |
| | | UUUUU (SEQ ID NO: 225) | CUUUUUCUUUGCCUGUAAAUAC |
| | | | AGUAUAACAUAUUAUUUCGUCC |
| | | | UUUUUU (SEQ ID NO: 248) |
| | sgRNA V2 | GUAUUGCUACCCUAAAUUAg | Not listed |
| | | aaaAAUAUUAGGACCUAGCAA | |
| | | UACAAGGCUUUAUGCCGAA | |
| | | AUCGGAGUCGACGGGCUCCU | |
| | | UUUUU (SEQ ID NO: 226) | |
| | sgRNA V2 | GUAUUGCUACCCUAAAUUA | Not listed |
| | crRNA | (SEQ ID NO: 227) | |
| | (Repeat) | | |
| | sgRNA V2 | GUAUUGCUACCCUAA (SEQ | Not listed |
| | Partial | ID NO: 228) | |
| | crRNA 1 | | |
| | sgRNA V2 | GUAUUGCUACCC (SEQ ID NO: | Not listed |
| | Partial | 229) | |
| | crRNA 2 | | |
| | sgRNA V2 | GUAUUGCUAC (SEQ ID NO: | Not listed |
| | Partial | 230) | |
| | crRNA 3 | | |
| | sgRNA V2 | AAUAUUAGGACCUAGCAAU | Not listed |
| | tracrRNA | AC (SEQ ID NO: 231) | |
| | (Antirepeat) | | |
| | sgRNA V2 | UUAGGACCUAGCAAUAC | Not listed |
| | Partial | (SEQ ID NO: 232) | |
| | tracrRNA 1 | | |
| | sgRNA V2 | GGACCUAGCAAUAC (SEQ ID | Not listed |
| | Partial | NO: 233) | |
| | tracrRNA 2 | | |
| | sgRNA V2 | CUAGCAAUAC (SEQ ID NO: | Not listed |
| | Partial | 234) | |
| | tracrRNA 3 | | |
| | sgRNA V3 | Not listed | GUUUUGGGCCUCUGAUGGgaaaCC |
| | | | AUCAGAGACCUGAGAUAAGGCU |
| | | | UUAUGCCGUAGGGUAUGGCGGU |
| | | | AACCCGGAGUAUUCCGAAUCCG |
| | | | CUUUUUUU (SEQ ID NO: 249) |
| | sgRNA V3 | Not listed | AAGGCUUUAUGCCGUAGGGUAU |
| | Modified | | G (SEQ ID NO: 250) |
| | tracrRNA | | |
| | Portion 1 | | |
| | sgRNA V3 | Not listed | GCGGUAACCCGGAGUAUUCCGA |
| | Modified | | AUCCGCUUUUUUU (SEQ ID NO: |
| | tracrRNA | | 251) |
| | Portion 2 | | |
| | sgRNA V3 | Not listed | GCGGUAACCCGGAGUAUUCCGA |
| | Modified | | AUCCGC (SEQ ID NO: 252) |
| | tracrRNA | | |
| | polyT | | |
| | | OMNI-98 with sgRNA 9 | OMNI-99 with sgRNA 10 |
| crRNA:tracr | crRNA | GUUGUGAAUUGCUUUC (SEQ | GUUGUGAAUUGCUUUC (SEQ ID |
| RNA duplex | (Repeat) | ID NO: 253) | NO: 266) |
| V1 | Partial | GUUGUGAAUUGCUUU (SEQ | GUUGUGAAUUGCUUU (SEQ ID |
| | crRNA 1 | ID NO: 254) | NO: 267) |
| | Partial | GUUGUGAAUUGC (SEQ ID | GUUGUGAAUUGC (SEQ ID NO: |
| | crRNA 2 | NO: 255) | 268) |
| | Partial | GUUGUGAAUU (SEQ ID NO: | GUUGUGAAUU (SEQ ID NO: 269) |
| | crRNA 3 | 256) | |
| | tracrRNA | GAAAGCAAUUCACAAU (SEQ | GAAGCAAUUCACAAU (SEQ ID |
| | (Antirepeat) | ID NO: 257) | NO: 270) |
| | Partial | AAAGCAAUUCACAAU (SEQ | AAGCAAUUCACAAU (SEQ ID NO: |
| | tracrRNA 1 | ID NO: 258) | 271) |
| | Partial | GCAAUUCACAAU (SEQ ID | GCAAUUCACAAU (SEQ ID NO: |
| | tracrRNA 2 | NO: 259) | 272) |
| | Partial | AAUUCACAAU (SEQ ID NO: | AAUUCACAAU (SEQ ID NO: 273) |
| | tracrRNA 3 | 260) | |
| tracrRNA | tracrRNA | AAGGAUUAUUCCGUUGU | AAGGAUUAUUCCGU (SEQ ID NO: |
| sequences | Portion 1 | (SEQ ID NO: 261) | 274) |
| | tracrRNA | GGAUUAUUCC (SEQ ID NO: | GGAUUAUUCC (SEQ ID NO: 275) |
| | Portion 1- | 262) | |
| | partial | | |
| | tracrRNA | Not listed | Not listed |
| | Portion 1- | | |
| | polyT | | |
| | tracrRNA | GAAAACAUUUAGGACGGGG | UGUGAAAACAUC (SEQ ID NO: |
| | Portion 2 | CAACUCGUCCUUUGUUUUUU | 276) |
| | | U (SEQ ID NO: 263) | |
| | tracrRNA | GAAAACAUUUAGGACGGGG | Not listed |
| | Portion 2- | CAACUCGUCCUUUG (SEQ ID | |
| | polyT | NO: 264) | |
| | tracrRNA | Not listed | AGGAGCGGGUUCUACUCGCUCU |
| | Portion 3 | | UUUUU (SEQ ID NO: 277) |
| | tracrRNA | Not listed | AGGAGCGGGUUCUACUCGCUC |
| | Portion 3- | | (SEQ ID NO: 278) |
| | polyT | | |
| sgRNA | sgRNA V1 | GUUGUGAAUUGCUUUCgaaaG | GUUGUGAAUUGCUUUCgaaaGAA |
| Versions | | AAAGCAAUUCACAAUAAGG | GCAAUUCACAAUAAGGAUUAUU |
| | | AUUAUUCCGUUGUGAAAAC | CCGUUGUGAAAACAUCAGGAGC |
| | | AUUUAGGACGGGGCAACUC | GGGUUCUACUCGCUCUUUUUU |
| | | GUCCUUUGUUUUUUU (SEQ | (SEQ ID NO: 279) |
| | | ID NO: 265) | |
| | | OMNI-101, OMNI-104, or | |
| | | OMNI-105 with sgRNA 11 | OMNI-132 with sgRNA 12 |
| crRNA:tracr | crRNA | GUUGCACCUAGAC (SEQ ID | GUUUGAGAGUAGUGUAA (SEQ |
| RNA duplex | (Repeat) | NO: 280) | ID NO: 288) |
| V1 | Partial | Not listed | GUUUGAGAGUAGUGU (SEQ ID |
| | crRNA 1 | | NO: 289) |
| | Partial | GUUGCACCUAGA (SEQ ID | GUUUGAGAGUAG (SEQ ID NO: |
| | crRNA 2 | NO: 281) | 290) |
| | Partial | GUUGCACCUA (SEQ ID NO: | GUUUGAGAGU (SEQ ID NO: 291) |
| | crRNA 3 | 282) | |
| | tracrRNA | GUCUUUGUGU (SEQ ID NO: | UUACACUACAAGUUCAAAU (SEQ |
| | (Antirepeat) | 283) | ID NO: 292) |
| | Partial | Not listed | ACACUACAAGUUCAAAU (SEQ ID |
| | tracrRNA 1 | | NO: 293) |
| | Partial | UCUUUGUGU | CUACAAGUUCAAAU (SEQ ID NO: |
| | tracrRNA 2 | | 294) |
| | Partial | UUUGUGU | ACAAGUUCAAAU (SEQ ID NO: |
| | tracrRNA 3 | | 295) |
| tracrRNA | tracrRNA | UAAUAAGAACCUUUCUUUG | AAAAAUUUAUUCAAAUCCUUUU |
| sequences | Portion 1 | GAAAGGAGUUCACCAUUUA | GCUACAUUGUGUAGAAUUU |
| | | C (SEQ ID NO: 284) | (SEQ ID NO: 296) |
| | tracrRNA | AAACAGGCACUUCGGUGUCU | AAAGAUCUGGCAACAGAUCUUU |
| | Portion 2 | GUUUUUU (SEQ ID NO: 285) | UUUU (SEQ ID NO: 297) |
| | tracrRNA | AAACAGGCACUUCGGUGUCU | AAAGAUCUGGCAACAGAUC (SEQ |
| | Portion 2- | G (SEQ ID NO: 286) | ID NO: 298) |
| | polyT | | |
| sgRNA | sgRNA V1 | GUUGCACCUAGACgaaaGUCU | GUUUGAGAGUAGUGUAAgaaaUU |
| Versions | | UUGUGUUAAUAAGAACCUU | ACACUACAAGUUCAAAUAAAAA |
| | | UCUUUGGAAAGGAGUUCAC | UUUAUUCAAAUCCUUUUGCUAC |
| | | CAUUUACAAACAGGCACUUC | AUUGUGUAGAAUUUAAAGAUCU |
| | | GGUGUCUGUUUUUU (SEQ ID | GGCAACAGAUCUUUUUUU (SEQ |
| | | NO: 287) | ID NO: 299) |
| | sgRNA V2 | Not listed | GUUUGAGAGUAGUGUAAgaaaUU |
| | | | ACACUACAAGUUCAAAUAAAAA |
| | | | UUUAUUCAAAUCCAUUUGCUAC |
| | | | AUUGUGUAGAAUUUAAAGAUCU |
| | | | GGCAACAGAUCUUUUUUU (SEQ |
| | | | ID NO: 300) |
| | sgRNA V2 | Not listed | AAAAAUUUAUUCAAAUCCAUUU |
| | Modified | | GCUACAUUGUGUAGAAUUU |
| | tracrRNA | | (SEQ ID NO: 301) |
| | Portion 2 | | |
| | | OMNI-101, OMNI-104, or | OMNI-101, OMNI-104, or OMNI- |
| | | OMNI-105 with sgRNA 13 | 105 with sgRNA 14 |
| crRNA:tracr | crRNA | GUUGCACCUAGACACCGA | GUUGCACCUAGACACC (SEQ ID |
| RNA duplex | (Repeat) | (SEQ ID NO: 302) | NO: 313) |
| V1 | Partial | GUUGCACCUAGACAC (SEQ | GUUGCACCUAGACAC (SEQ ID |
| | crRNA 1 | ID NO: 303) | NO: 314) |
| | Partial | GUUGCACCUAGA (SEQ ID | GUUGCACCUAGA (SEQ ID NO: |
| | crRNA 2 | NO: 304) | 315) |
| | Partial | GUUGCACCUA (SEQ ID NO: | GUUGCACCUA (SEQ ID NO: 316) |
| | crRNA 3 | 305) | |
| | tracrRNA | UCGGUGUCUUUGUGU (SEQ | GGUGUCUUUGUGU (SEQ ID NO: |
| | (Antirepeat) | ID NO: 306) | 317) |
| | Partial | GUGUCUUUGUGU (SEQ ID | GUGUCUUUGUGU (SEQ ID NO: |
| | tracrRNA 1 | NO: 307) | 318) |
| | Partial | UCUUUGUGU | UCUUUGUGU |
| | tracrRNA 2 | | |
| | Partial | UUUGUGU | UUUGUGU |
| | tracrRNA 3 | | |
| tracrRNA | tracrRNA | UAAUAAGAACCUUUCUUUG | Not listed |
| sequences | Portion 1 | GAAAGGAGUUCACCAUUUA | |
| | | C (SEQ ID NO: 308) | |
| | tracrRNA | GAACCUUUCUUUGGAAAGG | UAAUAAGAACCUUUCUUUGGAA |
| | Portion 1- | AGUUC (SEQ ID NO: 309) | AGGAGUUCACCAUUUAC (SEQ ID |
| | partial | | NO: 319) |
| | tracrRNA | AAACAGGCACUUCGGUGUCU | AAACAGGCACUUCGGUGUCUGU |
| | Portion 2 | GUUUUUU (SEQ ID NO: 310) | UUUUUU (SEQ ID NO: 320) |
| | tracrRNA | AAACAGGCACUUCGGUGUCU | AAACAGGCACUUCGGUGUCUG |
| | Portion 2- | G (SEQ ID NO: 311) | (SEQ ID NO: 321) |
| | polyT | | |
| sgRNA | sgRNA V1 | GUUGCACCUAGACACCGAgaa | GUUGCACCUAGACACCgaaaGGUG |
| Versions | | aUCGGUGUCUUUGUGUUAAU | UCUUUGUGUUAAUAAGAACCUU |
| | | AAGAACCUUUCUUUGGAAA | UCUUUGGAAAGGAGUUCACCAU |
| | | GGAGUUCACCAUUUACAAAC | UUACAAACAGGCACUUCGGUGU |
| | | AGGCACUUCGGUGUCUGUU | CUGUUUUUUU (SEQ ID NO: 322) |
| | | UUUU (SEQ ID NO: 312) | |
| | | OMNI-106 with sgRNA 15 | OMNI-107 with sgRNA 16 |
| crRNA:tracr | crRNA | GUUUGAGAGUCGUGCUG | GUUUGAGUAUGGUGUUA (SEQ |
| RNA duplex | (Repeat) | (SEQ ID NO: 323) | ID NO: 336) |
| V1 | Partial | GUUUGAGAGUCGUGC (SEQ | GUUUGAGUAUGGUGU (SEQ ID |
| | crRNA 1 | ID NO: 324) | NO: 337) |
| | Partial | GUUUGAGAGUCG (SEQ ID | GUUUGAGUAUGG (SEQ ID NO: |
| | crRNA 2 | NO: 325) | 338) |
| | Partial | GUUUGAGAGU (SEQ ID NO: | GUUUGAGUAU (SEQ ID NO: 339) |
| | crRNA 3 | 326) | |
| | tracrRNA | CAACACGACGGGUUCAAAU | UAACACCAUUAGUUCAAAU (SEQ |
| | (Antirepeat) | (SEQ ID NO: 327) | ID NO: 340) |
| | Partial | ACACGACGGGUUCAAAU | ACACCAUUAGUUCAAAU (SEQ ID |
| | tracrRNA 1 | (SEQ ID NO: 328) | NO: 341) |
| | Partial | CGACGGGUUCAAAU (SEQ ID | CCAUUAGUUCAAAU (SEQ ID NO: |
| | tracrRNA 2 | NO: 329) | 342) |
| | Partial | ACGGGUUCAAAU (SEQ ID | AUUAGUUCAAAU (SEQ ID NO: |
| | tracrRNA 3 | NO: 330) | 343) |
| tracrRNA | tracrRNA | ACGGCUUUGCCAAA (SEQ ID | AAGAUUUUUUCAAAUC (SEQ ID |
| sequences | Portion 1 | NO: 331) | NO: 344) |
| | tracrRNA | GGCUUUGCC | GAUUUUUUCAAAUC (SEQ ID NO: |
| | Portion 1- | | 345) |
| | partial | | |
| | tracrRNA | Not listed | Not listed |
| | Portion 1- | | |
| | polyT | | |
| | tracrRNA | ACCGCUGGUUUGAUCCAGCU | GCCGAUUUUUCGGUA (SEQ ID |
| | Portion 2 | UCACAGUGUGUGAGGGU | NO: 346) |
| | | (SEQ ID NO: 332) | |
| | tracrRNA | Not listed | Not listed |
| | Portion 2- | | |
| | polyT | | |
| | tracrRNA | AAAAAGUCCGCUAUGCGGAC | GUACACGAUGUGUACAUU (SEQ |
| | Portion 3 | UUUUUUU (SEQ ID NO: 333) | ID NO: 347) |
| | tracrRNA | AAAAAGUCCGCUAUGCGGAC | Not listed |
| | Portion 3- | (SEQ ID NO: 334) | |
| | polyT | | |
| | tracrRNA | Not listed | GGAUCUGUUGCAAGACAGGUCC |
| | Portion 4 | | UUUUUUU (SEQ ID NO: 348) |
| | tracrRNA | Not listed | GGAUCUGUUGCAAGACAGGUCC |
| | Portion 4- | | (SEQ ID NO: 349) |
| | polyT | | |
| sgRNA | sgRNA V1 | GUUUGAGAGUCGUGCUGgaaa | GUUUGAGUAUGGUGUUAgaaaUA |
| Versions | | CAACACGACGGGUUCAAAUA | ACACCAUUAGUUCAAAUAAGAU |
| | | CGGCUUUGCCAAAACCGCUG | UUUUUCAAAUCGCCGAUUUUUC |
| | | GUUUGAUCCAGCUUCACAGU | GGUAGUACACGAUGUGUACAUU |
| | | GUGUGAGGGUAAAAAGUCC | GGAUCUGUUGCAAGACAGGUCC |
| | | GCUAUGCGGACUUUUUUU | UUUUUUU (SEQ ID NO: 350) |
| | | (SEQ ID NO: 335) | |
| | sgRNA V2 | Not listed | GUUUGAGUAUGGUGUUAgaaaUA |
| | | | ACACCAUUAGUUCAAAUAAGAU |
| | | | UUAUUCAAAUCGCCGAUAUUUC |
| | | | GGUAGUACACGAUGUGUACAUU |
| | | | GGAUCUGUUGCAAGACAGGUCC |
| | | | UUUUUUU (SEQ ID NO: 351) |
| | sgRNA V2 | Not listed | AAGAUUUAUUCAAAUC (SEQ ID |
| | Modified | | NO: 352) |
| | tracrRNA | | |
| | Portion 1 | | |
| | sgRNA V2 | Not listed | GCCGAUAUUUCGGUA (SEQ ID |
| | Modified | | NO: 353) |
| | tracrRNA | | |
| | Portion 2 | | |
| | sgRNA V3 | Not listed | GUUUGAGUAUGGUGUUAgaaaUA |
| | | | ACACCAUUAGUUCAAAUAAGAU |
| | | | UUUUUCAAAUCGCCGAUUUUUC |
| | | | GGUAGUACACGAUGUGUACAUU |
| | | | UUUU (SEQ ID NO: 354) |
| | | OMNI-109 with sgRNA 17 | OMNI-110 with sgRNA 18 |
| crRNA:tracr | crRNA | GUUUGAGAGUAGUGUAA | GUUGUGAUUCGCUUCC (SEQ ID |
| RNA duplex | (Repeat) | (SEQ ID NO: 355) | NO: 367) |
| V1 | Partial | GUUUGAGAGUAGUGU (SEQ | GUUGUGAUUCGCUUC (SEQ ID |
| | crRNA 1 | ID NO: 356) | NO: 368) |
| | Partial | GUUUGAGAGUAG (SEQ ID | GUUGUGAUUCGC (SEQ ID NO: |
| | crRNA 2 | NO: 357) | 369) |
| | Partial | GUUUGAGAGU (SEQ ID NO: | GUUGUGAUUC (SEQ ID NO: 370) |
| | crRNA 3 | 358) | |
| | tracrRNA | UUACACUACAAGUUCAAAU | GCAAGCGAAUCACAAU (SEQ ID |
| | (Antirepeat) | (SEQ ID NO: 359) | NO: 371) |
| | Partial | ACACUACAAGUUCAAAU | CAAGCGAAUCACAAU (SEQ ID |
| | tracrRNA 1 | (SEQ ID NO: 360) | NO: 372) |
| | Partial | CUACAAGUUCAAAU (SEQ ID | GCGAAUCACAAU (SEQ ID NO: |
| | tracrRNA 2 | NO: 361) | 373) |
| | Partial | ACAAGUUCAAAU (SEQ ID | GAAUCACAAU (SEQ ID NO: 374) |
| | tracrRNA 3 | NO: 362) | |
| tracrRNA | tracrRNA | AAAAAUUUAUUCUAAUCGC | AAGGAUUAUUCCGU (SEQ ID NO: |
| sequences | Portion 1 | UCUUCGGAGCCUCCACAGGA | 375) |
| | | GUGGAUUU (SEQ ID NO: 363) | |
| | tracrRNA | Not listed | GGAUUAUUCC (SEQ ID NO: 376) |
| | Portion 1- | | |
| | partial | | |
| | tracrRNA | AAGACUUGCUUCGGCGAGUC | UGUGAAAACAUUU (SEQ ID NO: |
| | Portion 2 | UUUUUU (SEQ ID NO: 364) | 377) |
| | tracrRNA | AAGACUUGCUUCGGCGAGUC | Not listed |
| | Portion 2- | (SEQ ID NO: 365) | |
| | polyT | | |
| | tracrRNA | Not listed | AAGUCGGGCCUCCUUCGGUUGG |
| | Portion 3 | | CUCGGCUUUUUUU (SEQ ID NO: |
| | | | 378) |
| | tracrRNA | Not listed | AAGUCGGGCCUCCUUCGGUUGG |
| | Portion 3- | | CUCGGC (SEQ ID NO: 379) |
| | polyT | | |
| sgRNA | sgRNA V1 | GUUUGAGAGUAGUGUAAgaaa | GUUGUGAUUCGCUUCCgaaaGCAA |
| Versions | | UUACACUACAAGUUCAAAU | GCGAAUCACAAUAAGGAUUAUU |
| | | AAAAAUUUAUUCUAAUCGC | CCGUUGUGAAAACAUUUAAGUC |
| | | UCUUCGGAGCCUCCACAGGA | GGGCCUCCUUCGGUUGGCUCGG |
| | | GUGGAUUUAAGACUUGCUU | CUUUUUUU (SEQ ID NO: 380) |
| | | CGGCGAGUCUUUUUU (SEQ | |
| | | ID NO: 366) | |
| | | OMNI-113 or OMNI-134 with | OMNI-114 or OMNI-116 with |
| | | sgRNA 19 | sgRNA 20 |
| crRNA:tracr | crRNA | GUUUGAGAGUAUUGUU (SEQ | GUUUUACUUGCCUGUC (SEQ ID |
| RNA duplex | (Repeat) | ID NO: 381) | NO: 396) |
| V1 | Partial | GUUUGAGAGUAUUGU (SEQ | GUUUUACUUGCCUGU (SEQ ID |
| | crRNA 1 | ID NO: 382) | NO: 397) |
| | Partial | GUUUGAGAGUAU (SEQ ID | GUUUUACUUGCC (SEQ ID NO: |
| | crRNA 2 | NO: 383) | 398) |
| | Partial | GUUUGAGAGU (SEQ ID NO: | GUUUUACUUG (SEQ ID NO: 399) |
| | crRNA 3 | 384) | |
| | tracrRNA | AACAAUCGUUCAAAU (SEQ | GAUAGGCAAUAAAAC (SEQ ID |
| | (Antirepeat) | ID NO: 385) | NO: 400) |
| | Partial | ACAAUCGUUCAAAU (SEQ ID | AUAGGCAAUAAAAC (SEQ ID NO: |
| | tracrRNA 1 | NO: 386) | 401) |
| | Partial | AUCGUUCAAAU (SEQ ID NO: | GGCAAUAAAAC (SEQ ID NO: 402) |
| | tracrRNA 2 | 387) | |
| | Partial | CGUUCAAAU | CAAUAAAAC |
| | tracrRNA 3 | | |
| tracrRNA | tracrRNA | AAGGUUUUACCUUAAGC | AAAUAUAAUUUCUUUUGAAAUU |
| sequences | Portion 1 | (SEQ ID NO: 388) | AUAUGUAAAAUGUUU (SEQ ID |
| | | | NO: 403) |
| | tracrRNA | AAGGUUUUACCUU (SEQ ID | AUAUAAUUUCUUUUGAAAUUAU |
| | Portion 1- | NO: 389) | AU (SEQ ID NO: 404) |
| | partial | | |
| | tracrRNA | AUCCUAUUGGAUC (SEQ ID | AAAGCCCUCCUUUUCAGGGGGG |
| | Portion 2 | NO: 390) | CUUUUUU (SEQ ID NO: 405) |
| | tracrRNA | Not listed | AAAGCCCUCCUUUUCAGGGGGG |
| | Portion 2- | | C (SEQ ID NO: 406) |
| | polyT | | |
| | tracrRNA | AGUCGACUAAUCAGAGUCG | Not listed |
| | Portion 3 | ACUAUUUUUU (SEQ ID NO: | |
| | | 391) | |
| | tracrRNA | AGUCGACUAAUCAGAGUCG | Not listed |
| | Portion 3- | ACUA (SEQ ID NO: 392) | |
| | polyT | | |
| sgRNA | sgRNA V1 | GUUUGAGAGUAUUGUUgaaaA | GUUUUACUUGCCUGUCgaaaGAU |
| Versions | | ACAAUCGUUCAAAUAAGGU | AGGCAAUAAAACAAAUAUAAUU |
| | | UUUACCUUAAGCAUCCUAUU | UCUUUUGAAAUUAUAUGUAAAA |
| | | GGAUCAGUCGACUAAUCAG | UGUUUAAAGCCCUCCUUUUCAG |
| | | AGUCGACUAUUUUUU (SEQ | GGGGGCUUUUUU (SEQ ID NO: |
| | | ID NO: 393) | 407) |
| | sgRNA V2 | GUUUGAGAGUAUUGUUgaaaA | GUUGUACUUGCCUGUCgaaaGAU |
| | | ACAAUCGUUCAAAUAAGGU | AGGCAAUAUAACAAAUAUAAUU |
| | | AUUACCUUAAGCAUCCUAUU | UCUUCUGAAAUUAUAUGUAAAA |
| | | GGAUCAGUCGACUAAUCAG | UGUUUAAAGCCCUCCUUAUCAG |
| | | AGUCGACUAUUUUUU (SEQ | GGGGGCUUUUUU (SEQ ID NO: |
| | | ID NO: 394) | 408) |
| | sgRNA V2 | Not listed | GUUGUACUUGCCUGUC (SEQ ID |
| | crRNA | | NO: 409) |
| | (Repeat) | | |
| | sgRNA V2 | Not listed | GUUGUACUUGCCUGU (SEQ ID |
| | Partial | | NO: 410) |
| | crRNA 1 | | |
| | sgRNA V2 | Not listed | GUUGUACUUGCC (SEQ ID NO: |
| | Partial | | 411) |
| | crRNA 2 | | |
| | sgRNA V2 | Not listed | GUUGUACUUG (SEQ ID NO: 412) |
| | Partial | | |
| | crRNA 3 | | |
| | sgRNA V2 | Not listed | GAUAGGCAAUAUAAC (SEQ ID |
| | tracrRNA | | NO: 413) |
| | (Antirepeat) | | |
| | sgRNA V2 | Not listed | AUAGGCAAUAUAAC (SEQ ID NO: |
| | Partial | | 414) |
| | tracrRNA 1 | | |
| | sgRNA V2 | Not listed | GGCAAUAUAAC (SEQ ID NO: 415) |
| | Partial | | |
| | tracrRNA 2 | | |
| | sgRNA V2 | Not listed | CAAUAUAAC |
| | Partial | | |
| | tracrRNA 3 | | |
| | sgRNA V2 | AAGGUAUUACCUUAAGC | AAAUAUAAUUUCUUCUGAAAUU |
| | Modified | (SEQ ID NO: 395) | AUAUGUAAAAUGUUU (SEQ ID |
| | tracrRNA | | NO: 416) |
| | Portion 1 | | |
| | sgRNA V2 | Not listed | AAAGCCCUCCUUAUCAGGGGGG |
| | Modified | | CUUUUUU (SEQ ID NO: 417) |
| | tracrRNA | | |
| | Portion 3 | | |
| | sgRNA V2 | Not listed | AAAGCCCUCCUUAUCAGGGGGG |
| | Modified | | C (SEQ ID NO: 418) |
| | tracrRNA | | |
| | polyT | | |
| | | OMNI-118 with sgRNA 21 | OMNI-119 with sgRNA 22 |
| crRNA:tracr | crRNA | GUUGUGAUUUGCUCUCAAA | GUUGUGAUUUGCUGAG (SEQ ID |
| RNA duplex | (Repeat) | U (SEQ ID NO: 419) | NO: 435) |
| V1 | Partial | GUUGUGAUUUGCUCU (SEQ | GUUGUGAUUUGCUGA (SEQ ID |
| | crRNA 1 | ID NO: 420) | NO: 436) |
| | Partial | GUUGUGAUUUGC (SEQ ID | GUUGUGAUUUGC (SEQ ID NO: |
| | crRNA 2 | NO: 421) | 437) |
| | Partial | GUUGUGAUUU (SEQ ID NO: | GUUGUGAUUU (SEQ ID NO: 438) |
| | crRNA 3 | 422) | |
| | tracrRNA | AUUUGUGAGACUUAUCACA | CUAGCAAAUCACAAU (SEQ ID |
| | (Antirepeat) | AC (SEQ ID NO: 423) | NO: 439) |
| | Partial | UGAGACUUAUCACAAC (SEQ | UAGCAAAUCACAAU (SEQ ID NO: |
| | tracrRNA 1 | ID NO: 424) | 440) |
| | Partial | GACUUAUCACAAC (SEQ ID | GCAAAUCACAAU (SEQ ID NO: |
| | tracrRNA 2 | NO: 425) | 441) |
| | Partial | UUAUCACAAC (SEQ ID NO: | AAAUCACAAU (SEQ ID NO: 442) |
| | tracrRNA 3 | 426) | |
| tracrRNA | tracrRNA | AAGGCUAUAAGCCGAAGUA | AAGGAUUAUUCCGUUGUGAACA |
| sequences | Portion 1 | UU (SEQ ID NO: 427) | CAUUAGGUCCC (SEQ ID NO: 443) |
| | tracrRNA | GGCUAUAAGCC (SEQ ID NO: | GGAUUAUUCC (SEQ ID NO: 444) |
| | Portion 1- | 428) | |
| | partial | | |
| | tracrRNA | AACUCCGCGAUUUUGUCGUG | AACCCAUCGUCCUUUAACGGUG |
| | Portion 2 | GAGUUUUUUU (SEQ ID NO: | GGUUAUUUUUU (SEQ ID NO: 445) |
| | | 429) | |
| | tracrRNA | AACUCCGCGAUUUUGUCGUG | AACCCAUCGUCCUUUAACGGUG |
| | Portion 2- | GAG (SEQ ID NO: 430) | GGUUA (SEQ ID NO: 446) |
| | polyT | | |
| sgRNA | sgRNA V1 | GUUGUGAUUUGCUCUCAAA | GUUGUGAUUUGCUGAGgaaaCUA |
| Versions | | UgaaaAUUUGUGAGACUUAUC | GCAAAUCACAAUAAGGAUUAUU |
| | | ACAACAAGGCUAUAAGCCGA | CCGUUGUGAACACAUUAGGUCC |
| | | AGUAUUAACUCCGCGAUUU | CAACCCAUCGUCCUUUAACGGU |
| | | UGUCGUGGAGUUUUUUU | GGGUUAUUUUUU (SEQ ID NO: |
| | | (SEQ ID NO: 431) | 447) |
| | sgRNA V2 | GUUGUGAUUUGCUCUCAAA | Not listed |
| | | UgaaaAUUUGUGAGACUUAUC | |
| | | ACAACAAGGCUAUAAGCCGA | |
| | | AGUAUUAACUCCGCGAUUA | |
| | | UGUCGUGGAGUUUUUUU | |
| | | (SEQ ID NO: 432) | |
| | sgRNA V2 | AACUCCGCGAUUAUGUCGUG | Not listed |
| | Modified | GAGUUUUUUU (SEQ ID NO: | |
| | tracrRNA | 433) | |
| | Portion 2 | | |
| | sgRNA V2 | AACUCCGCGAUUAUGUCGUG | Not listed |
| | Modified | GAG (SEQ ID NO: 434) | |
| | tracrRNA | | |
| | polyT | | |
| | | OMNI-120 with sgRNA 23 | OMNI-121 with sgRNA 24 |
| crRNA:tracr | crRNA | GUUUGAGAGCCUUGUUA | GUUGUGAAUUGCUUGAAAUUCU |
| RNA duplex | (Repeat) | (SEQ ID NO: 448) | U (SEQ ID NO: 465) |
| V1 | Partial | GUUUGAGAGCCUUGU (SEQ | GUUGUGAAUUGCUUG (SEQ ID |
| | crRNA 1 | ID NO: 449) | NO: 466) |
| | Partial | GUUUGAGAGCCU (SEQ ID | GUUGUGAAUUGC (SEQ ID NO: |
| | crRNA 2 | NO: 450) | 467) |
| | Partial | GUUUGAGAGC (SEQ ID NO: | GUUGUGAAUU (SEQ ID NO: 468) |
| | crRNA 3 | 451) | |
| | tracrRNA | UAACAAGGCGAGUGCAAAU | GAAUUUCAGCAAUUCACAAU |
| | (Antirepeat) | (SEQ ID NO: 452) | (SEQ ID NO: 469) |
| | Partial | ACAAGGCGAGUGCAAAU | CAGCAAUUCACAAU (SEQ ID NO: |
| | tracrRNA 1 | (SEQ ID NO: 453) | 470) |
| | Partial | AGGCGAGUGCAAAU (SEQ ID | GCAAUUCACAAU (SEQ ID NO: |
| | tracrRNA 2 | NO: 454) | 471) |
| | Partial | GCGAGUGCAAAU (SEQ ID | AAUUCACAAU (SEQ ID NO: 472) |
| | tracrRNA 3 | NO: 455) | |
| tracrRNA | tracrRNA | AAGGUUUAACCGAAUUCA | AAGGAUUAUUCCGUUGUGAAAA |
| sequences | Portion 1 | (SEQ ID NO: 456) | CAUUCAGGUUCCU (SEQ ID NO: |
| | | | 473) |
| | tracrRNA | GGUUUAACC | Not listed |
| | Portion 1- | | |
| | partial | | |
| | tracrRNA | CCGUUUAUGGA (SEQ ID NO: | GCCCUCGUCCUUUAACGGGGGC |
| | Portion 2 | 457) | UUUUUU (SEQ ID NO: 474) |
| | tracrRNA | Not listed | GCCCUCGUCCUUUAACGGGGGC |
| | Portion 2- | | (SEQ ID NO: 475) |
| | polyT | | |
| | tracrRNA | CCGCAUUGUGCGGAUUUUA | Not listed |
| | Portion 3 | A (SEQ ID NO: 458) | |
| | tracrRNA | AAAAGACUUUCAAAGUCUU | Not listed |
| | Portion 4 | UUUU (SEQ ID NO: 459) | |
| | tracrRNA | AAAAGACUUUCAAAGUC | Not listed |
| | Portion 4- | (SEQ ID NO: 460) | |
| | polyT | | |
| sgRNA | sgRNA V1 | GUUUGAGAGCCUUGUUAgaaa | GUUGUGAAUUGCUUGAAAUUCU |
| Versions | | UAACAAGGCGAGUGCAAAU | UgaaaGAAUUUCAGCAAUUCACA |
| | | AAGGUUUAACCGAAUUCACC | AUAAGGAUUAUUCCGUUGUGAA |
| | | GUUUAUGGACCGCAUUGUG | AACAUUCAGGUUCCUGCCCUCG |
| | | CGGAUUUUAAAAAAGACUU | UCCUUUAACGGGGGCUUUUUU |
| | | UCAAAGUCUUUUUU (SEQ ID | (SEQ ID NO: 476) |
| | | NO: 461) | |
| | sgRNA V2 | GUUUGAGAGCCUUGUUAgaaa | Not listed |
| | | UAACAAGGCGAGUGCAAAU | |
| | | AAGGUUUAACCGAAUUCACC | |
| | | GUUUAUGGACCGCAUUGUG | |
| | | CGGAUUUAAAAAAAGACUU | |
| | | UCAAAGUCUUUUUU (SEQ ID | |
| | | NO: 462) | |
| | sgRNA V2 | CCGCAUUGUGCGGAUUUAA | Not listed |
| | Modified | A (SEQ ID NO: 463) | |
| | tracrRNA | | |
| | Portion 3 | | |
| | sgRNA V3 | GUUUGAGAGCCUUGUUAgaaa | Not listed |
| | | UAACAAGGCGAGUGCAAAU | |
| | | AAGGUUUAACCGAAUUCACC | |
| | | GUUUAUGGACCGCAUUGUG | |
| | | CGGAUUUUUU (SEQ ID NO: | |
| | | 464) | |
| | | OMNI-122 with sgRNA 25 | OMNI-123 with sgRNA 26 |
| crRNA:tracr | crRNA | GUUGUGAAUUGCUUUC (SEQ | GUUAUAGUUCCCUGAUAGU |
| RNA duplex | (Repeat) | ID NO: 477) | (SEQ ID NO: 491) |
| V1 | Partial | GUUGUGAAUUGCUUU (SEQ | GUUAUAGUUCCCUGA (SEQ ID |
| | crRNA 1 | ID NO: 478) | NO: 492) |
| | Partial | GUUGUGAAUUGC (SEQ ID | GUUAUAGUUCCC (SEQ ID NO: |
| | crRNA 2 | NO: 479) | 493) |
| | Partial | GUUGUGAAUU (SEQ ID NO: | GUUAUAGUUC (SEQ ID NO: 494) |
| | crRNA 3 | 480) | |
| | tracrRNA | GAAGCAAUUCACAAU (SEQ | ACUAUGAGGUUGCUAUAAU |
| | (Antirepeat) | ID NO: 481) | (SEQ ID NO: 495) |
| | Partial | AAGCAAUUCACAAU (SEQ ID | UGAGGUUGCUAUAAU (SEQ ID |
| | tracrRNA 1 | NO: 482) | NO: 496) |
| | Partial | GCAAUUCACAAU (SEQ ID | GGUUGCUAUAAU (SEQ ID NO: |
| | tracrRNA 2 | NO: 483) | 497) |
| | Partial | AAUUCACAAU (SEQ ID NO: | UUGCUAUAAU (SEQ ID NO: 498) |
| | tracrRNA 3 | 484) | |
| tracrRNA | tracrRNA | AAGGAUUAUUCCGU (SEQ ID | AAGGUAGUAAACCGC (SEQ ID |
| sequences | Portion 1 | NO: 485) | NO: 499) |
| | tracrRNA | GGAUUAUUCC (SEQ ID NO: | GGUAGUAAACC (SEQ ID NO: 500) |
| | Portion 1- | 486) | |
| | partial | | |
| | tracrRNA | UGUGAAAACAUUU (SEQ ID | AGAGCUCUAACGCCUCACAUUU |
| | Portion 2 | NO: 487) | GUGGGGCGUUAUCUCUUUUUUU |
| | | | (SEQ ID NO: 501) |
| | tracrRNA | Not listed | AGAGCUCUAACGCCUCACAUUU |
| | Portion 2- | | GUGGGGCGUUAUCUC (SEQ ID |
| | polyT | | NO: 502) |
| | tracrRNA | AAGAGAGUCCUUCGUCCUUC | Not listed |
| | Portion 3 | GGAGGAUUCUUUUUU (SEQ | |
| | | ID NO: 488) | |
| | tracrRNA | AAGAGAGUCCUUCGUCCUUC | Not listed |
| | Portion 3- | GGAGGAUUC (SEQ ID NO: | |
| | polyT | 489) | |
| sgRNA | sgRNA V1 | GUUGUGAAUUGCUUUCgaaaG | GUUAUAGUUCCCUGAUAGUgaaa |
| Versions | | AAGCAAUUCACAAUAAGGA | ACUAUGAGGUUGCUAUAAUAAG |
| | | UUAUUCCGUUGUGAAAACA | GUAGUAAACCGCAGAGCUCUAA |
| | | UUUAAGAGAGUCCUUCGUCC | CGCCUCACAUUUGUGGGGCGUU |
| | | UUCGGAGGAUUCUUUUUU | AUCUCUUUUUUU (SEQ ID NO: |
| | | (SEQ ID NO: 490) | 503) |
| | | OMNI-125 with sgRNA 27 | OMNI-126 with sgRNA 28 |
| crRNA:tracr | crRNA | GUUGUGAAUGGCUUUC (SEQ | GUUGUGGCUUGUUGAAGAA |
| RNA duplex | (Repeat) | ID NO: 504) | (SEQ ID NO: 517) |
| V1 | Partial | GUUGUGAAUGGCUUU (SEQ | GUUGUGGCUUGUUGA (SEQ ID |
| | crRNA 1 | ID NO: 505) | NO: 518) |
| | Partial | GUUGUGAAUGGC (SEQ ID | GUUGUGGCUUGU (SEQ ID NO: |
| | crRNA 2 | NO: 506) | 519) |
| | Partial | GUUGUGAAUG (SEQ ID NO: | GUUGUGGCUU (SEQ ID NO: 520) |
| | crRNA 3 | 507) | |
| | tracrRNA | UUGAAGCCAUUCACAAU | UUCUUCAACUUGUCACAAU (SEQ |
| | (Antirepeat) | (SEQ ID NO: 508) | ID NO: 521) |
| | Partial | GAAGCCAUUCACAAU (SEQ | UCAACUUGUCACAAU (SEQ ID |
| | tracrRNA 1 | ID NO: 509) | NO: 522) |
| | Partial | GCCAUUCACAAU (SEQ ID NO: | ACUUGUCACAAU (SEQ ID NO: |
| | tracrRNA 2 | 510) | 523) |
| | Partial | CAUUCACAAU (SEQ ID NO: | UUGUCACAAU (SEQ ID NO: 524) |
| | tracrRNA 3 | 511) | |
| tracrRNA | tracrRNA | AAGGAUUAUUCCGUUGUGA | AAGGCCCUUAAGGCCGA (SEQ ID |
| sequences | Portion 1 | (SEQ ID NO: 512) | NO: 525) |
| | tracrRNA | GGAUUAUUCC (SEQ ID NO: | GGCCCUUAAGGCC (SEQ ID NO: |
| | Portion 1- | 513) | 526) |
| | partial | | |
| | tracrRNA | AAACAUUAAGAGCGGGUCG | AGGUUGAAAAACCUAU (SEQ ID |
| | Portion 2 | UGAGACUCGCUCUUCUGUGU | NO: 527) |
| | | UUAUUUUUU (SEQ ID NO: | |
| | | 514) | |
| | tracrRNA | AAACAUUAAGAGCGGGUCG | Not listed |
| | Portion 2- | UGAGACUCGCUCUUCUGUGU | |
| | polyT | UUA (SEQ ID NO: 515) | |
| | tracrRNA | Not listed | GGCUCUACUUCGGUGGAGCCUU |
| | Portion 3 | | UUUU (SEQ ID NO: 528) |
| | tracrRNA | Not listed | GGCUCUACUUCGGUGGAGCC |
| | Portion 3- | | (SEQ ID NO: 529) |
| | polyT | | |
| sgRNA | sgRNA V1 | GUUGUGAAUGGCUUUCgaaaU | GUUGUGGCUUGUUGAAGAAgaaa |
| Versions | | UGAAGCCAUUCACAAUAAG | UUCUUCAACUUGUCACAAUAAG |
| | | GAUUAUUCCGUUGUGAAAA | GCCCUUAAGGCCGAAGGUUGAA |
| | | CAUUAAGAGCGGGUCGUGA | AAACCUAUGGCUCUACUUCGGU |
| | | GACUCGCUCUUCUGUGUUUA | GGAGCCUUUUUU (SEQ ID NO: |
| | | UUUUUU (SEQ ID NO: 516) | 530) |
| | | OMNI-128 with sgRNA 29 | OMNI-129 with sgRNA 30 |
| crRNA:tracr | crRNA | GUUGUGAUUUGCUGAA (SEQ | GUUGUAGUUCCCUAAUGUU |
| RNA duplex | (Repeat) | ID NO: 531) | (SEQ ID NO: 545) |
| V1 | Partial | GUUGUGAUUUGCUGA (SEQ | GUUGUAGUUCCCUAA (SEQ ID |
| | crRNA 1 | ID NO: 532) | NO: 546) |
| | Partial | GUUGUGAUUUGC (SEQ ID | GUUGUAGUUCCC (SEQ ID NO: |
| | crRNA 2 | NO: 533) | 547) |
| | Partial | GUUGUGAUUU (SEQ ID NO: | GUUGUAGUUC (SEQ ID NO: 548) |
| | crRNA 3 | 534) | |
| | tracrRNA | UUCAGCAAAUCACAAU (SEQ | GACAUUAGGUUACUGCGAU |
| | (Antirepeat) | ID NO: 535) | (SEQ ID NO: 549) |
| | Partial | UCAGCAAAUCACAAU (SEQ | UUAGGUUACUGCGAU (SEQ ID |
| | tracrRNA 1 | ID NO: 536) | NO: 550) |
| | Partial | GCAAAUCACAAU (SEQ ID | GGUUACUGCGAU (SEQ ID NO: |
| | tracrRNA 2 | NO: 537) | 551) |
| | Partial | AAAUCACAAU (SEQ ID NO: | UUACUGCGAU (SEQ ID NO: 552) |
| | tracrRNA 3 | 538) | |
| tracrRNA | tracrRNA | AAGGAUUAUUCCGU (SEQ ID | CAGGCAGUAUGCCU (SEQ ID NO: |
| sequences | Portion 1 | NO: 539) | 553) |
| | tracrRNA | GGAUUAUUCC (SEQ ID NO: | AGGCAGUAUGCCU (SEQ ID NO: |
| | Portion 1- | 540) | 554) |
| | partial | | |
| | tracrRNA | UGUGAAAACAUUC (SEQ ID | CAGAGCUCCGCCCUAACCACGU |
| | Portion 2 | NO: 541) | UUUGUGGUUGGGGCGUCUUUGC |
| | | | AUUUUUU (SEQ ID NO: 555) |
| | tracrRNA | Not listed | CAGAGCUCCGCCCUAACCACGU |
| | Portion 2- | | UUUGUGGUUGGGGCGUCUUUGC |
| | polyT | | A (SEQ ID NO: 556) |
| | tracrRNA | AAGGCGGCGCAAGUCGCCUU | Not listed |
| | Portion 3 | UUUU (SEQ ID NO: 542) | |
| | tracrRNA | AAGGCGGCGCAAGUCGCC | Not listed |
| | Portion 3- | (SEQ ID NO: 543) | |
| | polyT | | |
| sgRNA | sgRNA V1 | GUUGUGAUUUGCUGAAgaaaU | GUUGUAGUUCCCUAAUGUUgaaa |
| Versions | | UCAGCAAAUCACAAUAAGG | GACAUUAGGUUACUGCGAUCAG |
| | | AUUAUUCCGUUGUGAAAAC | GCAGUAUGCCUCAGAGCUCCGC |
| | | AUUCAAGGCGGCGCAAGUCG | CCUAACCACGUUUUGUGGUUGG |
| | | CCUUUUUU (SEQ ID NO: 544) | GGCGUCUUUGCAUUUUUU (SEQ |
| | | | ID NO: 557) |
| | sgRNA V2 | Not listed | GUUGUAGUUCCCUAAUGUUgaaa |
| | | | GACAUUAGGUUACUGCGAUCAG |
| | | | GCAGUAUGCCUCAGAGCUCCGC |
| | | | CCUAACCACGUCUUGUGGUUGG |
| | | | GGCGUCUUUGCAUUUUUU (SEQ |
| | | | ID NO: 558) |
| | sgRNA V2 | Not listed | CAGAGCUCCGCCCUAACCACGUC |
| | Modified | | UUGUGGUUGGGGCGUCUUUGCA |
| | tracrRNA | | UUUUUU (SEQ ID NO: 559) |
| | Portion 2 | | |
| | sgRNA V2 | Not listed | CAGAGCUCCGCCCUAACCACGUC |
| | Modified | | UUGUGGUUGGGGCGUCUUUGCA |
| | tracrRNA | | (SEQ ID NO: 560) |
| | polyT | | |
| | | OMNI-131 with sgRNA 31 | OMNI-132 with sgRNA 32 |
| crRNA:tracr | crRNA | GUUUGAGAAUGAUGUAA | GUUUGAGAGUAGUGUAA (SEQ |
| RNA duplex | (Repeat) | (SEQ ID NO: 561) | ID NO: 576) |
| V1 | Partial | GUUUGAGAAUGAUGU (SEQ | GUUUGAGAGUAGUGU (SEQ ID |
| | crRNA 1 | ID NO: 562) | NO: 577) |
| | Partial | GUUUGAGAAUGA (SEQ ID | GUUUGAGAGUAG (SEQ ID NO: |
| | crRNA 2 | NO: 563) | 578) |
| | Partial | GUUUGAGAAU (SEQ ID NO: | GUUUGAGAGU (SEQ ID NO: 579) |
| | crRNA 3 | 564) | |
| | tracrRNA | UUACAUCAUAAGUUCAAAU | UUACACUACAAGUUCAAAU (SEQ |
| | (Antirepeat) | (SEQ ID NO: 565) | ID NO: 580) |
| | Partial | ACAUCAUAAGUUCAAAU | ACACUACAAGUUCAAAU (SEQ ID |
| | tracrRNA 1 | (SEQ ID NO: 566) | NO: 581) |
| | Partial | UCAUAAGUUCAAAU (SEQ ID | CUACAAGUUCAAAU (SEQ ID NO: |
| | tracrRNA 2 | NO: 567) | 582) |
| | Partial | AUAAGUUCAAAU (SEQ ID | ACAAGUUCAAAU (SEQ ID NO: |
| | tracrRNA 3 | NO: 568) | 583) |
| tracrRNA | tracrRNA | AACGAUUUAUCGAAGAC | AAAAAUUUAUUCAAAUCCUUUU |
| sequences | Portion 1 | (SEQ ID NO: 569) | GCUACAUUGUGUAGAAUUU |
| | | | (SEQ ID NO: 584) |
| | tracrRNA | CGAUUUAUCG (SEQ ID NO: | Not listed |
| | Portion 1- | 570) | |
| | partial | | |
| | tracrRNA | GCCGUUUAUAACGGC (SEQ | AAAGAUCUGGCAACAGAUCUUU |
| | Portion 2 | ID NO: 571) | UUUAUUUUUU (SEQ ID NO: 585) |
| | tracrRNA | Not listed | AAAGAUCUGGCAACAGAUCUUU |
| | Portion 2- | | UUUA (SEQ ID NO: 586) |
| | polyT | | |
| | tracrRNA | CCACAGUGAGUGGAAAG | Not listed |
| | Portion 3 | (SEQ ID NO: 572) | |
| | tracrRNA | AAAGCUGUUGCUCAUAGGA | Not listed |
| | Portion 4 | GCAGCAGUUUUUU (SEQ ID | |
| | | NO: 573) | |
| | tracrRNA | AAAGCUGUUGCUCAUAGGA | Not listed |
| | Portion 4- | GCAGCAG (SEQ ID NO: 574) | |
| | polyT | | |
| sgRNA | sgRNA V1 | GUUUGAGAAUGAUGUAAgaaa | GUUUGAGAGUAGUGUAAgaaaUU |
| Versions | | UUACAUCAUAAGUUCAAAU | ACACUACAAGUUCAAAUAAAAA |
| | | AACGAUUUAUCGAAGACGCC | UUUAUUCAAAUCCUUUUGCUAC |
| | | GUUUAUAACGGCCCACAGUG | AUUGUGUAGAAUUUAAAGAUCU |
| | | AGUGGAAAGAAAGCUGUUG | GGCAACAGAUCUUUUUUAUUUU |
| | | CUCAUAGGAGCAGCAGUUU | UU (SEQ ID NO: 587) |
| | | UUU (SEQ ID NO: 575) | |
| | sgRNA V2 | Not listed | GUUUGAGAGUAGUGUAAgaaaUU |
| | | | ACACUACAAGUUCAAAUAAAAA |
| | | | UUUAUUCAAAUCCUUUUGCUAC |
| | | | AUUGUGUAGAAUUUAAAGAUCU |
| | | | GGCAACAGAUCUUUUUU (SEQ ID |
| | | | NO: 588) |
| | sgRNA V3 | Not listed | GUUUGAGAGUAGUGUAAgaaaUU |
| | | | ACACUACAAGUUCAAAUAAAAA |
| | | | UUUAUUCAAAUCCAUUUGCUAC |
| | | | AUUGUGUAGAAUUUAAAGAUCU |
| | | | GGCAACAGAUCUUUUUU (SEQ ID |
| | | | NO: 589) |
| | sgRNA V3 | Not listed | AAAAAUUUAUUCAAAUCCAUUU |
| | Modified | | GCUACAUUGUGUAGAAUUU |
| | tracrRNA | | (SEQ ID NO: 590) |
| | Portion 1 | | |
| | | | OMNI-113 or OMNI-134 with |
| | | OMNI-133 with sgRNA 33 | sgRNA 34 |
| crRNA:tracr | crRNA | GUUUGAGAACCUUGUAA | GUUUGAGAGUAUUGUUAUU |
| RNA duplex | (Repeat) | (SEQ ID NO: 591) | (SEQ ID NO: 600) |
| V1 | Partial | GUUUGAGAACCUUGU (SEQ | GUUUGAGAGUAUUGU (SEQ ID |
| | crRNA 1 | ID NO: 592) | NO: 601) |
| | Partial | Not listed | GUUUGAGAGUAU (SEQ ID NO: |
| | crRNA 2 | | 602) |
| | Partial | Not listed | GUUUGAGAGU (SEQ ID NO: 603) |
| | crRNA 3 | | |
| | tracrRNA | UUACAAGGU | AAUAACAAUCGUUCAAAU (SEQ |
| | (Antirepeat) | | ID NO: 604) |
| | Partial | ACAAGGU | ACAAUCGUUCAAAU (SEQ ID NO: |
| | tracrRNA 1 | | 605) |
| | Partial | Not listed | AUCGUUCAAAU (SEQ ID NO: 606) |
| | tracrRNA 2 | | |
| tracrRNA | Partial | Not listed | CGUUCAAAU |
| sequences | tracrRNA 3 | | |
| | tracrRNA | GAGUGCAAAUAAGGAUUUU | AAGGUUUUACCUUAAGC (SEQ ID |
| | Portion 1 | UCCGAAAUCACUCCUCAUAA | NO: 607) |
| | | GAGU (SEQ ID NO: 593) | |
| | tracrRNA | | AAGGUUUUACCUU (SEQ ID NO: |
| | Portion 1- | | 608) |
| | partial | | |
| | tracrRNA | CCGCAUUGUGCGGU (SEQ ID | AUCCUAUUGGAUC (SEQ ID NO: |
| | Portion 2 | NO: 594) | 609) |
| | tracrRNA | GAAAAGACUCUGCCAAGAG | AGUCGACUAACCAGAGUCGACU |
| | Portion 3 | UCUUUUUU (SEQ ID NO: 595) | AUUUUUU (SEQ ID NO: 610) |
| | tracrRNA | GAAAAGACUCUGCCAAGAG | AGUCGACUAACCAGAGUCGACU |
| | Portion 3- | UC (SEQ ID NO: 596) | A (SEQ ID NO: 611) |
| | polyT | | |
| sgRNA | sgRNA V1 | GUUUGAGAACCUUGUAAgaaa | GUUUGAGAGUAUUGUUAUUgaaa |
| Versions | | UUACAAGGUGAGUGCAAAU | AAUAACAAUCGUUCAAAUAAGG |
| | | AAGGAUUUUUCCGAAAUCA | UUUUACCUUAAGCAUCCUAUUG |
| | | CUCCUCAUAAGAGUCCGCAU | GAUCAGUCGACUAACCAGAGUC |
| | | UGUGCGGUGAAAAGACUCU | GACUAUUUUUU (SEQ ID NO: 612) |
| | | GCCAAGAGUCUUUUUU (SEQ | |
| | | ID NO: 597) | |
| | sgRNA V2 | GUUUGAGAACCUUGUAAgaaa | GUUUGAGAGUAUUGUUAUUgaaa |
| | | UUACAAGGUGAGUGCAAAU | AAUAACAAUCGUUCAAAUAAGG |
| | | AAGGAUUCUUCCGAAAUCAC | UAUUACCUUAAGCAUCCUAUUG |
| | | UCCUCAUAAGAGUCCGCAUU | GAUCAGUCGACUAACCAGAGUC |
| | | GUGCGGUGAAAAGACUCUG | GACUAUUUUUU (SEQ ID NO: 613) |
| | | CCAAGAGUCUUUUUU (SEQ | |
| | | ID NO: 598) | |
| | sgRNA V2 | GAGUGCAAAUAAGGAUUCU | AAGGUAUUACCUUAAGC (SEQ ID |
| | Modified | UCCGAAAUCACUCCUCAUAA | NO: 614) |
| | tracrRNA | GAGU (SEQ ID NO: 599) | |
| | Portion 1 | | |
| | | OMNI-135 with sgRNA 35 | OMNI-136 with sgRNA 36 |
| crRNA:tracr | crRNA | GUUUGAGAACCUUGUAA | GUUGUAGUUCCCUGUUAAU |
| | (Repeat) | (SEQ ID NO: 615) | (SEQ ID NO: 632) |
| RNA duplex | Partial | GUUUGAGAACCUUGU (SEQ | GUUGUAGUUCCCUGU (SEQ ID |
| | crRNA 1 | ID NO: 616) | NO: 633) |
| V1 | Partial | GUUUGAGAACCU (SEQ ID | GUUGUAGUUCCC (SEQ ID NO: |
| | crRNA 2 | NO: 617) | 634) |
| | Partial | GUUUGAGAAC (SEQ ID NO: | GUUGUAGUUC (SEQ ID NO: 635) |
| | crRNA 3 | 618) | |
| | tracrRNA | UUACAAGGUGAGUGCAAAU | AUUUUCGGGUUACUAUGAU |
| | (Antirepeat) | (SEQ ID NO: 619) | (SEQ ID NO: 636) |
| | Partial | ACAAGGUGAGUGCAAAU | UCGGGUUACUAUGAU (SEQ ID |
| | tracrRNA 1 | (SEQ ID NO: 620) | NO: 637) |
| | Partial | AGGUGAGUGCAAAU (SEQ ID | GGUUACUAUGAU (SEQ ID NO: |
| | tracrRNA 2 | NO: 621) | 638) |
| | Partial | GUGAGUGCAAAU (SEQ ID | UUACUAUGAU (SEQ ID NO: 639) |
| | tracrRNA 3 | NO: 622) | |
| tracrRNA | tracrRNA | AAGGAUUUUUCCGAAAUCA | AAGGUAGAACACCG (SEQ ID NO: |
| sequences | Portion 1 | C (SEQ ID NO: 623) | 640) |
| | tracrRNA | Not listed | GGUAGAACACC (SEQ ID NO: 641) |
| | Portion 1- | | |
| | partial | | |
| | tracrRNA | UCCUCAUGGAUGU (SEQ ID | AAAAGCUCUAACGCCUUGCCAU |
| | Portion 2 | NO: 625) | UUGGUGAGGCGUUAUCUUUUUU |
| | | | (SEQ ID NO: 642) |
| | tracrRNA | Not listed | AAAAGCUCUAACGCCUUGCCAU |
| | Portion 2- | | UUGGUGAGGCGUUAUC (SEQ ID |
| | polyT | | NO: 643) |
| | tracrRNA | CCGCAUUGUGCGGU (SEQ ID | Not listed |
| | Portion 3 | NO: 626) | |
| | tracrRNA | GAAAAAGACUCUGUUUAGA | Not listed |
| | Portion 4 | GUCUUUUUU (SEQ ID NO: | |
| | | 627) | |
| | tracrRNA | GAAAAAGACUCUGUUUAGA | Not listed |
| | Portion 4- | GUC (SEQ ID NO: 628) | |
| | polyT | | |
| sgRNA | sgRNA V1 | GUUUGAGAACCUUGUAAgaaa | GUUGUAGUUCCCUGUUAAUgaaa |
| Versions | | UUACAAGGUGAGUGCAAAU | AUUUUCGGGUUACUAUGAUAAG |
| | | AAGGAUUUUUCCGAAAUCA | GUAGAACACCGAAAAGCUCUAA |
| | | CUCCUCAUGGAUGUCCGCAU | CGCCUUGCCAUUUGGUGAGGCG |
| | | UGUGCGGUGAAAAAGACUC | UUAUCUUUUUU (SEQ ID NO: 644) |
| | | UGUUUAGAGUCUUUUUU | |
| | | (SEQ ID NO: 629) | |
| | sgRNA V2 | GUUUGAGAACCUUGUAAgaaa | GUUGUAGUUCCCUGUUAAUgaaa |
| | | UUACAAGGUGAGUGCAAAU | AUUAUCGGGUUACUAUGAUAAG |
| | | AAGGAUUCUUCCGAAAUCAC | GUAGAACACCGAAAAGCUCUAA |
| | | UCCUCAUGGAUGUCCGCAUU | CGCCUUGCCAUUUGGUGAGGCG |
| | | GUGCGGUGAAAAAGACUCU | UUAUCUUUUUU (SEQ ID NO: 645) |
| | | GUUUAGAGUCUUUUUU (SEQ | |
| | | ID NO: 630) | |
| | sgRNA V2 | Not listed | AUUAUCGGGUUACUAUGAU |
| | tracrRNA | | (SEQ ID NO: 646) |
| | (Antirepeat) | | |
| | sgRNA V2 | AAGGAUUCUUCCGAAAUCAC | Not listed |
| | Modified | (SEQ ID NO: 631) | |
| | tracrRNA | | |
| | Portion 1 | | |
| | | OMNI-137 with sgRNA 37 | OMNI-138 with sgRNA 38 |
| crRNA:tracr | crRNA | GUUUUAGUUCUCGGAC (SEQ | GUUGUAGUUCCCUAAUUAU |
| RNA duplex | (Repeat) | ID NO: 647) | (SEQ ID NO: 666) |
| V1 | Partial | GUUUUAGUUCUCGGA (SEQ | GUUGUAGUUCCCUAA (SEQ ID |
| | crRNA 1 | ID NO: 648) | NO: 667) |
| | Partial | GUUUUAGUUCUC (SEQ ID | GUUGUAGUUCCC (SEQ ID NO: |
| | crRNA 2 | NO: 649) | 668) |
| | Partial | GUUUUAGUUC (SEQ ID NO: | GUUGUAGUUC (SEQ ID NO: 669) |
| | crRNA 3 | 650) | |
| | tracrRNA | GUCCGAGAAUCUAAGAU | ACAAUUAGGUUACUAUGAU |
| | (Antirepeat) | (SEQ ID NO: 651) | (SEQ ID NO: 670) |
| | Partial | UCCGAGAAUCUAAGAU (SEQ | UUAGGUUACUAUGAU (SEQ ID |
| | tracrRNA 1 | ID NO: 652) | NO: 671) |
| | Partial | GAGAAUCUAAGAU (SEQ ID | GGUUACUAUGAU (SEQ ID NO: |
| | tracrRNA 2 | NO: 653) | 672) |
| | Partial | GAAUCUAAGAU (SEQ ID NO: | UUACUAUGAU (SEQ ID NO: 673) |
| | tracrRNA 3 | 654) | |
| tracrRNA | tracrRNA | AAAGCUAUAUGCUGU (SEQ | AAGGUAGUAUACCGC (SEQ ID |
| sequences | Portion 1 | ID NO: 655) | NO: 674) |
| | tracrRNA | AGCUAUAUGCU (SEQ ID NO: | GGUAGUAUACC (SEQ ID NO: 675) |
| | Portion 1- | 656) | |
| | partial | | |
| | tracrRNA | GGGGUUGCGUAUCCCCUUAU | AAAGCUCUAACGCCUCAUCUUA |
| | Portion 2 | CGAACGUACU (SEQ ID NO: | AUGAUGGGGCGUUAUCUUUUUU |
| | | 657) | (SEQ ID NO: 676) |
| | tracrRNA | Not listed | AAAGCUCUAACGCCUCAUCUUA |
| | Portion 2- | | AUGAUGGGGCGUUAUC (SEQ ID |
| | polyT | | NO: 677) |
| | tracrRNA | AAGAUGAGUUUCGGCUCAU | Not listed |
| | Portion 3 | CUUUUUU (SEQ ID NO: 658) | |
| | tracrRNA | AAGAUGAGUUUCGGCUCAU | Not listed |
| | Portion 3- | C (SEQ ID NO: 659) | |
| | polyT | | |
| sgRNA | sgRNA V1 | GUUUUAGUUCUCGGACgaaaG | GUUGUAGUUCCCUAAUUAUgaaa |
| Versions | | UCCGAGAAUCUAAGAUAAA | ACAAUUAGGUUACUAUGAUAAG |
| | | GCUAUAUGCUGUGGGGUUG | GUAGUAUACCGCAAAGCUCUAA |
| | | CGUAUCCCCUUAUCGAACGU | CGCCUCAUCUUAAUGAUGGGGC |
| | | ACUAAGAUGAGUUUCGGCU | GUUAUCUUUUUU (SEQ ID NO: |
| | | CAUCUUUUUU (SEQ ID NO: | 678) |
| | | 660) | |
| | sgRNA V2 | GUCUUAGUUCUCGGACgaaaG | Not listed |
| | | UCCGAGAAUCUAAGAUAAA | |
| | | GCUAUAUGCUGUGGGGUUG | |
| | | CGUAUCCCCUUAUCGAACGU | |
| | | ACUAAGAUGAGUUUCGGCU | |
| | | CAUCUUUUUU (SEQ ID NO: | |
| | | 661) | |
| | sgRNA V2 | GUCUUAGUUCUCGGAC (SEQ | Not listed |
| | crRNA | ID NO: 662) | |
| | (Repeat) | | |
| | sgRNA V2 | GUCUUAGUUCUCGGA (SEQ | Not listed |
| | Partial | ID NO: 663) | |
| | crRNA 1 | | |
| | sgRNA V2 | GUCUUAGUUCUC (SEQ ID | Not listed |
| | Partial | NO: 664) | |
| | crRNA 2 | | |
| | sgRNA V2 | GUCUUAGUUC (SEQ ID NO: | Not listed |
| | Partial | 665) | |
| | crRNA 3 | | |

| | | OMNI-113 or OMNI-134 with |
|---|---|---|
| | | sgRNA 39 |
| crRNA:tracr | crRNA | GUUAUUUUGAAUACUA (SEQ |
| RNA duplex | (Repeat) | ID NO: 679) |
| V1 | Partial | GUUAUUUUGAAUACU (SEQ |
| | crRNA 1 | ID NO: 680) |
| | Partial | GUUAUUUUGAAU (SEQ ID |
| | crRNA 2 | NO: 681) |
| | Partial | GUUAUUUUGA (SEQ ID NO: |
| | crRNA 3 | 682) |
| | tracrRNA | GUGUAUUUAAAGUAA (SEQ |
| | (Antirepeat) | ID NO: 683) |
| | Partial | UGUAUUUAAAGUAA (SEQ ID |
| | tracrRNA 1 | NO: 684) |
| | Partial | AUUUAAAGUAA (SEQ ID NO: |
| | tracrRNA 2 | 685) |
| | Partial | UUAAAGUAA |
| | tracrRNA 3 | |
| tracrRNA | tracrRNA | AUAAAAAGUUAAAUUUAAA |
| sequences | Portion 1 | GAUAAAAGUAAAUAAUUAG |
| | | UAAAUUAACUUCU (SEQ ID |
| | | NO: 686) |
| | tracrRNA | GAUAAUGUGAAAUUCAUUU |
| | Portion 2 | GUUUUUU (SEQ ID NO: 687) |
| | tracrRNA | GAUAAUGUGAAAUUCAUUU |
| | Portion 2- | G (SEQ ID NO: 688) |
| | polyT | |
| sgRNA | sgRNA V1 | GUUAUUUUGAAUACUAgaaaG |
| Versions | | UGUAUUUAAAGUAAAUAAA |
| | | AAGUUAAAUUUAAAGAUAA |
| | | AAGUAAAUAAUUAGUAAAU |
| | | UAACUUCUGAUAAUGUGAA |
| | | AUUCAUUUGUUUUUU (SEQ |
| | | ID NO: 689) |
| | sgRNA V2 | GUUACUUUGAAUACUAgaaaG |
| | | UGUAUUUAAAGUAAAUAAA |
| | | AAGUUAAAUUUAAAGAUAA |
| | | AAGUAAAUAAUUAGUAAAU |
| | | UAACUUCUGAUAAUGUGAA |
| | | AUUCAUUUGUUUUUU (SEQ |
| | | ID NO: 690) |
| | sgRNA V2 | GUUACUUUGAAUACUA (SEQ |
| | crRNA | ID NO: 691) |
| | (Repeat) | |
| | sgRNA V2 | GUUACUUUGAAUACU (SEQ |
| | Partial | ID NO: 692) |
| | crRNA 1 | |
| | sgRNA V2 | GUUACUUUGAAU (SEQ ID |
| | Partial | NO: 693) |
| | crRNA 2 | |
| | sgRNA V2 | GUUACUUUGA (SEQ ID NO: |
| | Partial | 694) |
| | crRNA 3 | |
| | sgRNA V2 | AAGGUAUUACCUUAAGC |
| | Modified | (SEQ ID NO: 695) |
| | tracrRNA | |
| | Portion 1 | |

TABLE 3
OMNI PAM Sequences showing activity for each tested sgRNA

| | TXTL Depletion | | | |
|---|---|---|---|---|
| | | | Activity | |
| | | | (1-Depletion | |
| | | | score*), per | |
| | | | respective sgRNA | |
| Name | PAM General | PAM Specific | listed in right col. | sgRNA |
| OMNI-90 | NNATTGYN | NNATWGNN | 0.95, 0.94, 0.95, 0.96 | sgRNA 1: V1, V2, V3, V4 |
| OMNI-91 | NNGNRTNN | NNRNRYNN | 0.96 | sgRNA 2: V1 |
| OMNI-92 | NNNNRYGA | NNNNRYKA | 0.97, 0.96 | sgRNA 3: V1, V2 |
| OMNI-93 | NNGGGGNN | NNRGGDNN | 0.99, 0.97 | sgRNA 4: V1, V2 |
| OMNI-94 | NNRRAYGN | | 0.69, 0.65 | sgRNA 5: V1, V2 |
| OMNI-95 | NNGYAANN | | 0.77, 0.64 | sgRNA 6: V1, V2 |
| OMNI-96 | NYAAGNNN | NWARRNNN | 0.57, 0.47 | sgRNA 7: V1, V2 |
| OMNI-97 | NNRCCANN | NNRCCMNN | 0.93, 0.97 | sgRNA 8: V1, V3 |
| OMNI-98 | NNAAATNN | | 0.93 | sgRNA 9: V1 |
| OMNI-99 | NAGACNNN | NRRVCNNN | 0.93 | sgRNA 10: V1 |
| OMNI-101 | NRRRNNNN | NVRDNNNN | 0.96, 0.98, 0.97 | sgRNA 11: V1; |
| | | | | sgRNA_13: V1. |
| | | | | sgRNA_14: V1 |
| OMNI-104 | NRRRNYCN | NRRRNNNN | 1, 0.92, 0.98 | sgRNA 11: V1; |
| | | | | sgRNA_13: V1. |
| | | | | sgRNA 14: V1 |
| OMNI-105 | NRRRNNNN | NRRRNNNN | 0.98, 1, 0.94 | sgRNA 11: V1; |
| | | | | sgRNA_13: V1. |
| | | | | sgRNA_14: V1 |
| OMNI-106 | NRKAACNN | NRNAACNN | 0.95 | sgRNA 15: V1 |
| OMNI-107 | NNNAANNN | | 0.7, 0.66, 0.83 | sgRNA 16: V1, V2, V3 |
| OMNI-109 | NNAARCNN | | 0.94 | sgRNA 17: V1 |
| OMNI-110 | NNRTNCNN | NNVNNCNN | 0.95 | sgRNA 18: V1 |
| OMNI-114 | NRGGACNN | NRRRRYNN | 0.96, 0.93 | sgRNA 20: V1, V2 |
| OMNI-116 | NRGGACNN | NRRRRYNN | 0.96, 0.96 | sgRNA 20: V1, V2 |
| OMNI-118 | NNRTTHNN | NNRTTNNN | 0.66, 0.78 | sgRNA 21: V1, V2 |
| OMNI-119 | NNACNNNN | NNAMNNNN | 0.97 | sgRNA 22: V1 |
| OMNI-120 | NRVACNNN | NRVVCNNN | 0.95, 0.95, 0.97 | sgRNA 23: V1, V2, V3 |
| OMNI-121 | NNAAAYNN | NNRVRYNN | 0.91 | sgRNA 24: V1 |
| OMNI-122 | NRYTTTYN | NRYHYYNN | 0.84 | sgRNA 25: V1 |
| OMNI-123 | NNNSGYAA | NNNNRYAN | 0.95 | sgRNA 26: V1 |
| OMNI-125 | NARNCCYN | NRRNCCNN | 0.95 | sgRNA 27: V1 |
| OMNI-126 | NNNNAARN | | 0.64 | sgRNA 28: V1 |
| OMNI-128 | NRYHCCNN | | 0.87 | sgRNA 29: V1 |
| OMNI-129 | NNNNGAAA | | 0.95, 0.96 | sgRNA 30: V1, V2 |
| OMNI-131 | NRWRCCNN | NRNRCCNN | 0.95 | sgRNA 31: V1 |
| OMNI-132 | NNAAATNN | NNRRDTNN | 0.97, 0.97, 0.96, 0.95 | sgRNA 12: V2; |
| | | | | sgRNA 32: V1, V2, V3 |
| OMNI-133 | NNTAMCNN | NNTRHYNN | 0.95, 0.96 | sgRNA 33: V1, V2 |
| OMNI-134 | NRAANYNN | NRWANBNN | 0.98, 0.97, 0.94, 0.93, | sgRNA 19: V1, V2; |
| | | | 0.99, 0.97 | sgRNA 34: V1, V2; |
| | | | | sgRNA 39: V1, V2 |
| OMNI-135 | NNWACCNN | NNWRYYNN | 0.95, 0.95 | sgRNA 35: V1, V2 |
| OMNI-136 | NNDRCNAA | NNDRCNDA | 0.97, 0.96 | sgRNA 36: V1, V2 |
| OMNI-137 | NNRCRGNN | NNRCVDNN | 0.97, 0.96 | sgRNA 37: V1, V2 |
| OMNI-138 | NNNNGTKA | NNNNGBKN | 0.97 | sgRNA 38: V1 |

*Depletion score - Average of the ratios from two most depleted sites

TABLE 4
Plasmids and Constructs

| Plasmid | Purpose | Elements | Example |
|---|---|---|---|
| pET9a | Expressing OMNI | T7 promoter HA | pET9a-OMNI-97 |
| | polypeptide in the | Tag-Linker-OMNI ORF | (SEQ ID |
| | bacterial system | (Human optimized)- | NO: 696) |
| | | SV40 NLS-8XHisTag- | |
| | | T7 terminator | |
| pbShuttle | Expressing OMNI | U6 promotor- | pShuttle Guide- |
| Guide T2 | sgRNA in the | T7promoter-T2 | T2-OMNI-97 V1 |
| | bacterial system | spacer sgRNA | (SEQ ID |
| | | scaffold-T7 terminator | NO: 697) |
| pbPOS T2 | Bacterial/TXTL | T2 protospacer-8N PAM | pbPOS T2 |
| library | depletion assay | library-chloramphenicol | library (SEQ ID |
| | | acetyltransferase | NO: 698) |

TABLE 4
Appendix - Details of construct elements

| Element | Protein Sequence | DNA sequence |
|---|---|---|
| HA Tag | SEQ ID NO: 699 | SEQ ID NO: 700 |
| NLS | SEQ ID NO: 701 | SEQ ID NO: 702 |
| P2A | SEQ ID NO: 703 | SEQ ID NO: 704 |
| mCherry | SEQ ID NO: 705 | SEQ ID NO: 706 |

TABLE 5
Nuclease activity in endogenous context in mammalian cells

| | | | | 3′ (PAM | |
|---|---|---|---|---|---|
| | | | | containing) | |
| | Genomic | Corresponding | | genomic | % |
| Nuclease | site | Spacer name | Spacer sequence | sequence | indels |
| OMNI-104 | TRAC | OMNI-104_TRAC_S21-ref | SEQ ID NO: 708 | CGGAACCC | 8.0% |
| OMNI-109 | B2M | OMNI-109_B2M_S81-ref | SEQ ID NO: 709 | TGAAGCTG | 7.0% |
| OMNI-109 | CXCR4 | OMNI-109_CXCR4_s185-ref | SEQ ID NO: 710 | GCAAACTG | 10.0% |
| OMNI-109 | PDCD1 | OMNI-109_PDCD1_S41-ref | SEQ ID NO: 712 | AGAAGCTG | 21.0% |
| OMNI-109 | TRAC | OMNI-109_TRAC_S31-ref | SEQ ID NO: 713 | TGAAACAG | 11.0% |
| OMNI-110 | B2M | OMNI-110_B2M_S77-ref | SEQ ID NO: 714 | CAATTCAG | 72.0% |
| OMNI-110 | CXCR4 | OMNI-110_CXCR4_s175-ref | SEQ ID NO: 715 | CCATTCCC | 9.0% |
| OMNI-110 | CXCR4 | OMNI-110_CXCR4_s179-ref | SEQ ID NO: 716 | CTATTCCC | 17.0% |
| OMNI-110 | SAMD9L | OMNI-110_SAMD9L_g113-alt | SEQ ID NO: 717 | GTAGGCAG | 9.0% |
| OMNI-114 | SAMD9L | OMNI-114_SAMD9L_g58-alt | SEQ ID NO: 718 | CAGAGTAA | 7.2% |
| OMNI-116 | SAMD9L | OMNI-116_SAMD9L_g58-alt | SEQ ID NO: 719 | CAGAGTAA | 2.0% |
| OMNI-118 | PDCD1 | OMNI-118_PDCD1_S45-ref | SEQ ID NO: 720 | GGGTTCCA | 3.0% |
| OMNI-120 | B2M | OMNI-120_B2M_s14-ref | SEQ ID NO: 721 | AGCACAGC | 19.3% |
| OMNI-120 | CXCR4 | OMNI-120_CXCR4_S35-ref | SEQ ID NO: 722 | CAGACTCA | 8.2% |
| OMNI-120 | ELANE | OMNI-120_ELANE_g117-ref | SEQ ID NO: 723 | GAGACAAA | 22.0% |
| OMNI-120 | ELANE | OMNI-120_ELANE_g62-ref | SEQ ID NO: 724 | GGGACAGA | 52.0% |
| OMNI-120 | PDCD1 | OMNI-120_PDCD1_S40-ref | SEQ ID NO: 725 | TAAACTGG | 29.0% |
| OMNI-120 | SAMD9 | OMNI-120_SAMD9_g30-ref | SEQ ID NO: 726 | AAAACAAT | 22.1% |
| OMNI-120 | SAMD9 | OMNI-120_SAMD9_g33-ref | SEQ ID NO: 727 | TAAACATT | 11.0% |
| OMNI-120 | SAMD9L | OMNI-120_SAMD9L_g133-alt | SEQ ID NO: 728 | CAAACTGA | 18.0% |
| OMNI-120 | SAMD9L | OMNI-120_SAMD9L_g80-alt | SEQ ID NO: 729 | AGAACTAC | 18.2% |
| OMNI-120 | SAMD9L | OMNI-120_SAMD9L_g91-alt | SEQ ID NO: 730 | AAAACACA | 14.1% |
| OMNI-120 | TRAC | OMNI-120_TRAC_S35-ref | SEQ ID NO: 731 | GAGACTCT | 41.3% |
| OMNI-120 | TRAC | OMNI-120_TRAC_S36-ref | SEQ ID NO: 732 | CAGACTTG | 28.5% |
| OMNI-120 | TRAC | OMNI-120_TRAC_s92-ref | SEQ ID NO: 733 | AGAACCCT | 21.0% |
| OMNI-120 | TRAC | OMNI-120_TRAC_s93-ref | SEQ ID NO: 734 | TAAACCCG | 32.2% |
| OMNI-121 | PDCD1 | OMNI-121_PDCD1_S49-ref | SEQ ID NO: 735 | TGAAATTA | 2.0% |
| OMNI-122 | TRAC | OMNI-122_TRAC_S50-ref | SEQ ID NO: 736 | GATTTTGA | 6.0% |
| OMNI-122 | TRAC | OMNI-122_TRAC_S51-ref | SEQ ID NO: 737 | CACTTTCA | 3.0% |
| OMNI-123 | PDCD1 | OMNI-123_PDCD1_S23-ref | SEQ ID NO: 738 | CGGCGCAA | 63.2% |
| OMNI-125 | PDCD1 | OMNI-125_PDCD1_S40-ref | SEQ ID NO: 739 | TAAACTGG | 3.3% |
| OMNI-125 | TRAC | OMNI-125_TRAC_S35-ref | SEQ ID NO: 740 | GAGACTCT | 9.0% |
| OMNI-126 | TRAC | OMNI-126_TRAC_S32-ref | SEQ ID NO: 741 | AGGTAAGG | 7.0% |
| OMNI-128 | PDCD1 | OMNI-128_PDCD1_S54-ref | SEQ ID NO: 742 | GGTTCCAG | 4.0% |
| OMNI-129 | GATA2 | OMNI-129_GATA2_g66-ref | SEQ ID NO: 743 | ACACGAAG | 10.0% |
| OMNI-129 | GATA2 | OMNI-129_GATA2_g67-ref | SEQ ID NO: 744 | ACCGGAAG | 31.0% |
| OMNI-129 | PDCD1 | OMNI-129_PDCD1_S67-ref | SEQ ID NO: 745 | GCAGGAAA | 53.1% |
| OMNI-129 | SAMD9L | OMNI-129_SAMD9L_g115-alt | SEQ ID NO: 746 | GTTTGAAA | 62.0% |
| OMNI-129 | SAMD9L | OMNI-129_SAMD9L_g164-alt | SEQ ID NO: 747 | AACTGAAT | 7.0% |
| OMNI-131 | TRAC | OMNI-131_TRAC_S44-ref | SEQ ID NO: 749 | GGAACCCA | 25.0% |
| OMNI-131 | TRAC | OMNI-131_TRAC_S56-ref | SEQ ID NO: 750 | TGTACCAG | 10.0% |
| OMNI-132 | TRAC | OMNI-132_TRAC_S11-ref | SEQ ID NO: 751 | CTAAATCC | 31.0% |
| OMNI-133 | SAMD9L | OMNI-133_SAMD9L_g116-alt | SEQ ID NO: 752 | TATATCAG | 2.0% |
| OMNI-135 | TRAC | OMNI-135_TRAC_S56-ref | SEQ ID NO: 753 | TGTACCAG | 29.2% |
| OMNI-136 | GATA2 | OMNI-136_GATA2_g60-ref | SEQ ID NO: 754 | TACACGAA | 22.1% |
| OMNI-136 | GATA2 | OMNI-136_GATA2_g71-ref | SEQ ID NO: 755 | ATGTCCAA | 81.5% |
| OMNI-136 | PDCD1 | OMNI-136_PDCD1_S59-ref | SEQ ID NO: 756 | CATGCAGA | 61.3% |
| OMNI-138 | SAMD9 | OMNI-138_SAMD9_g44-ref | SEQ ID NO: 757 | GACAGTAA | 33.0% |
| OMNI-138 | TRAC | OMNI-138_TRAC_S59-ref | SEQ ID NO: 758 | TCCAGTGA | 81.0% |
| OMNI-90 | PDCD1 | OMNI-90_PDCD1_S63-ref | SEQ ID NO: 759 | TCATTGCG | 2.1% |
| OMNI-91 | B2M | OMNI-91_B2M_S1-ref | SEQ ID NO: 760 | GAGAGTAG | 9.1% |
| OMNI-91 | CXCR4 | OMNI-91_CXCR4_S27-ref | SEQ ID NO: 761 | AAGCGTGA | 34.0% |
| OMNI-91 | PDCD1 | OMNI-91_PDCD1_S28-ref | SEQ ID NO: 762 | TGGTGTGA | 7.9% |
| OMNI-91 | PDCD1 | OMNI-91_PDCD1_S29-ref | SEQ ID NO: 763 | CAGGGTGA | 52.0% |
| OMNI-91 | SAMD9L | OMNI-91_SAMD9L_g58-alt | SEQ ID NO: 764 | CAGAGTAA | 29.0% |
| OMNI-91 | TRAC | OMNI-91_TRAC_S27-ref | SEQ ID NO: 765 | CAGGGTCA | 15.1% |
| OMNI-91 | TRAC | OMNI-91_TRAC_S28-ref | SEQ ID NO: 766 | CAGCGTCA | 81.0% |
| OMNI-91 | TRAC | OMNI-91_TRAC_s95-ref | SEQ ID NO: 767 | CCGTGTAC | 16.1% |
| OMNI-92 | TRAC | OMNI-92_TRAC_S30-ref | SEQ ID NO: 768 | CGTCATGA | 3.0% |
| OMNI-93 | B2M | OMNI-93_B2M_s18-ref | SEQ ID NO: 769 | TCGGGCCG | 17.0% |
| OMNI-93 | B2M | OMNI-93_B2M_s19-ref | SEQ ID NO: 770 | CTGGGTTT | 12.0% |
| OMNI-93 | SAMD9 | OMNI-93_SAMD9_g20-ref | SEQ ID NO: 771 | AAGGGTCT | 23.3% |
| OMNI-93 | SAMD9L | OMNI-93_SAMD9L_g68-alt | SEQ ID NO: 772 | GTGGGTCT | 24.0% |
| OMNI-93 | SARM1 | OMNI-93_SARM1_g48-ref | SEQ ID NO: 773 | TTGGGTGC | 27.0% |
| OMNI-93 | SERP | OMNI-93_SERP_g122-ref | SEQ ID NO: 774 | AAGGGACT | 17.0% |
| OMNI-93 | TRAC | OMNI-93_TRAC_s119-ref | SEQ ID NO: 775 | CTGGGGAA | 55.0% |
| OMNI-93 | TRAC | OMNI-93_TRAC_S25-ref | SEQ ID NO: 776 | CAGGGTTC | 64.0% |
| OMNI-93 | TRAC | OMNI-93_TRAC_S26-ref | SEQ ID NO: 777 | CCGGGTTT | 73.0% |
| OMNI-93 | TRAC | OMNI-93_TRAC_S27-ref | SEQ ID NO: 778 | CAGGGTCA | 84.0% |
| OMNI-95 | TRAC | OMNI-95_TRAC_S32-ref | SEQ ID NO: 779 | AGGTAAGG | 7.0% |
| OMNI-98 | PDCD1 | OMNI-98_PDCD1_S49-ref | SEQ ID NO: 780 | TGAAATTA | 6.0% |
| OMNI-98 | SAMD9L | OMNI-98_SAMD9L_g111-ref | SEQ ID NO: 781 | AAAAATGA | 4.0% |
| OMNI-98 | TRAC | OMNI-98_TRAC_S11-ref | SEQ ID NO: 782 | CTAAATCC | 2.3% |
| OMNI-99 | PDCD1 | OMNI-99_PDCD1_S37-ref | SEQ ID NO: 783 | CAGACGGA | 3.0% |
| OMNI-99 | SAMD9L | OMNI-99_SAMD9L_g76-ref | SEQ ID NO: 784 | AAGACCTC | 3.1% |
| OMNI-99 | TRAC | OMNI-99_TRAC_S35-ref | SEQ ID NO: 785 | GAGACTCT | 12.0% |

Table 5. Nuclease activity in endogenous context in mammalian cells: OMNI nucleases were expressed in mammalian cell system (HeLa) by DNA transfection together with an sgRNA expressing plasmid. Cell lysates were used for site specific genomic DNA amplification and NGS. The percentage of indels was measured and analyzed to determine the editing level. The spacer 3′ genomic sequence contains the expected PAM relevant for each OMNI nuclease.

TABLE 6
Synthetic sgRNAs (spacer and scaffold) for OMNI-93

| | | Spacer | Spacer | | Scaffold | |
|---|---|---|---|---|---|---|
| Gene | Site | Length | Sequence | PAM | sgRNA 4 V2 | Full sgRNA |
| TRAC | S119 | 25 nt | SEQ ID NO: | CUGGGGAA | SEQ ID NO: 792 | SEQ ID NO: 798 |
| | | | 786 | | | |
| | S119 | 24 nt | SEQ ID NO: | CUGGGGAA | SEQ ID NO: 793 | SEQ ID NO: 799 |
| | | | 787 | | | |
| | S119 | 23 nt | SEQ ID NO: | CUGGGGAA | SEQ ID NO: 794 | SEQ ID NO: 800 |
| | | | 788 | | | |
| | S119 | 22 nt | SEQ ID NO: | CUGGGGAA | SEQ ID NO: 795 | SEQ ID NO: 801 |
| | | | 789 | | | |
| | S119 | 21 nt | SEQ ID NO: | CUGGGGAA | SEQ ID NO: 796 | SEQ ID NO: 802 |
| | | | 790 | | | |
| | S119 | 20 nt | SEQ ID NO: | CUGGGGAA | SEQ ID NO: 797 | SEQ ID NO: 803 |
| | | | 791 | | | |

TABLE 7
OMNI-93 activity and spacer optimization as RNP in U2OS cells

| | | | Spacer | | |
|---|---|---|---|---|---|
| Gene | Site | Spacer Sequence | Length | % Indels | STD |
| TRAC | S119 | SEQ ID NO: 791 | 20 nt | 60.085 | 0.31819805 |
| | S119 | SEQ ID NO: 790 | 21 nt | 92.445 | 2.0435386 |
| | S119 | SEQ ID NO: 789 | 22 nt | 95.24 | 0.25455844 |
| | S119 | SEQ ID NO: 788 | 23 nt | 91.85 | 0.49497475 |
| | S119 | SEQ ID NO: 787 | 24 nt | 85.19 | 5.84070201 |
| | S119 | SEQ ID NO: 786 | 25 nt | 91.975 | 0.71417785 |

Table 7. OMNI-93 RNP was assembled with synthetic sgRNA (Agilent, Table 6) and electroporated into U2OS cells. Gene name, spacer sequences and length are indicated next to the editing level as was measured by NGS.

### REFERENCES

[0438] 1. Ahmad and Allen (1992) “Antibody-mediated Specific Binging and Cytotoxicity of Liposome-entrapped Doxorubicin to Lung Cancer Cells in Vitro”, Cancer Research 52:4817-20.
[0439] 2. Anderson (1992) “Human gene therapy”, Science 256:808-13.
[0440] 3. Basha et al. (2011) “Influence of Cationic Lipid Composition on Gene Silencing Properties of Lipid Nanoparticle Formulations of siRNA in Antigen-Presenting Cells”, Mol. Ther. 19(12):2186-200.
[0441] 4. Behr (1994) “Gene transfer with synthetic cationic amphiphiles: Prospects for gene therapy”, Bioconjugate Chem 5:382-89.
[0442] 5. Blaese et al. (1995) “Vectors in cancer therapy: how will they deliver”, Cancer Gene Ther. 2:291-97.
[0443] 6. Blaese et al. (1995) “T lymphocyte-directed gene therapy for ADA-SCID: initial trial results after 4 years”, Science 270(5235):475-80.
[0444] 7. Briner et al. (2014) “Guide RNA functional modules direct Cas9 activity and orthogonality”, Molecular Cell 56:333-39.
[0445] 8. Buchschacher and Panganiban (1992) “Human immunodeficiency virus vectors for inducible expression of foreign genes”, J. Virol. 66:2731-39.
[0446] 9. Burstein et al. (2017) “New CRISPR-Cas systems from uncultivated microbes”, Nature 542:237-41.
[0447] 10. Canver et al., (2015) “BCL11A enhancer dissection by Cas9-mediated in situ saturating mutagenesis”, Nature Vol. 527, Pgs. 192-214.
[0448] 11. Chang and Wilson (1987) “Modification of DNA ends can decrease end-joining relative to homologous recombination in mammalian cells”, Proc. Natl. Acad. Sci. USA 84:4959-4963.
[0449] 12. Charlesworth et al. (2019) “Identification of preexisting adaptive immunity to Cas9 proteins in humans”, Nature Medicine, 25(2), 249.
[0450] 13. Chung et al. (2006) “Agrobacterium is not alone: gene transfer to plants by viruses and other bacteria”, Trends Plant Sci. 11(1):1-4.
[0451] 14. Coelho et al. (2013) “Safety and efficacy of RNAi therapy for transthyretin amyloidosis” N. Engl. J. Med. 369, 819-829.
[0452] 15. Crystal (1995) “Transfer of genes to humans: early lessons and obstacles to success”, Science 270(5235):404-10.
[0453] 16. Dillon (1993) “Regulation gene expression in gene therapy” Trends in Biotechnology 11(5):167-173.
[0454] 17. Dranoff et al. (1997) “A phase I study of vaccination with autologous, irradiated melanoma cells engineered to secrete human granulocyte macrophage colony stimulating factor”, Hum. Gene Ther. 8(1):111-23.
[0455] 18. Dunbar et al. (1995) “Retrovirally marked CD34-enriched peripheral blood and bone marrow cells contribute to long-term engraftment after autologous transplantation”, Blood 85:3048-57.
[0456] 19. Ellem et al. (1997) “A case report: immune responses and clinical course of the first human use of granulocyte/macrophage-colony-stimulating-factor-transduced autologous melanoma cells for immunotherapy”, Cancer Immunol Immunother 44:10-20.
[0457] 20. Gao and Huang (1995) “Cationic liposome-mediated gene transfer” Gene Ther. 2(10):710-22.
[0458] 21. Haddada et al. (1995) “Gene Therapy Using Adenovirus Vectors”, in: The Molecular Repertoire of Adenoviruses III: Biology and Pathogenesis, ed. Doerfler and Böhm, pp. 297-306.
[0459] 22. Han et al. (1995) “Ligand-directed retro-viral targeting of human breast cancer cells”, Proc. Natl. Acad. Sci. USA 92(21):9747-51.
[0460] 23. Humbert et al., (2019) “Therapeutically relevant engraftment of a CRISPR-Cas9-edited HSC-enriched population with HbF reactivation in nonhuman primates”, Sci. Trans. Med., Vol. 11, Pgs. 1-13.
[0461] 24. Inaba et al. (1992) “Generation of large numbers of dendritic cells from mouse bone marrow cultures supplemented with granulocyte/macrophage colony-stimulating factor”, J Exp Med. 176(6):1693-702.
[0462] 25. Jiang and Doudna (2017) “CRISPR-Cas9 Structures and Mechanisms”, Annual Review of Biophysics 46:505-29.
[0463] 26. Jinek et al. (2012) “A programmable dual-RNA-guided DNA endonuclease in adaptive bacterial immunity”, Science 337(6096):816-21.
[0464] 27. Johan et al. (1992) “GLVR1, a receptor for gibbon ape leukemia virus, is homologous to a phosphate permease of Neurospora crassa and is expressed at high levels in the brain and thymus”, J Virol 66(3):1635-40.
[0465] 28. Judge et al. (2006) “Design of noninflammatory synthetic siRNA mediating potent gene silencing in vivo”, Mol Ther. 13(3):494-505.
[0466] 29. Kohn et al. (1995) “Engraftment of gene-modified umbilical cord blood cells in neonates with adnosine deaminase deficiency”, Nature Medicine 1:1017-23.
[0467] 30. Kremer and Perricaudet (1995) “Adenovirus and adeno-associated virus mediated gene transfer”, Br. Med. Bull. 51(1):31-44.
[0468] 31. Macdiarmid et al. (2009) “Sequential treatment of drug-resistant tumors with targeted minicells containing siRNA or a cytotoxic drug”, Nat Biotechnol. 27(7):643-51.
[0469] 32. Malech et al. (1997) “Prolonged production of NADPH oxidase-corrected granulocytes after gene therapy of chronic granulomatous disease”, PNAS 94(22):12133-38.
[0470] 33. Maxwell et al. (2018) “A detailed cell-free transcription-translation-based assay to decipher CRISPR protospacer adjacent motifs”, Methods 14348-57
[0471] 34. Miller et al. (1991) “Construction and properties of retrovirus packaging cells based on gibbon ape leukemia virus”, J Virol. 65(5):2220-24.
[0472] 35. Miller (1992) “Human gene therapy comes of age”, Nature 357:455-60.
[0473] 36. Mir et al. (2019) “Type II-C CRISPR-Cas9 Biology, Mechanism and Application”, ACS Chem. Biol. 13(2):357-365.
[0474] 37. Mitani and Caskey (1993) “Delivering therapeutic genes—matching approach and application”, Trends in Biotechnology 11(5):162-66.
[0475] 38. Nabel and Felgner (1993) “Direct gene transfer for immunotherapy and immunization”, Trends in Biotechnology 11(5):211-15.
[0476] 39. Nehls et al. (1996) “Two genetically separable steps in the differentiation of thymic epithelium” Science 272:886-889.
[0477] 40. Nishimasu et al. “Crystal structure of Cas9 in complex with guide RNA and target DNA” (2014) Cell 156(5):935-49.
[0478] 41. Nishimasu et al. (2015) “Crystal Structure of Staphylococcus aureus Cas9” Cell 162(5):1113-26.
[0479] 42. Palermo et al. (2018) “Key role of the REC lobe during CRISPR-Cas9 activation by ‘sensing’, ‘regulating’, and ‘locking’ the catalytic HNH domain” Quarterly Reviews of Biophysics 51, e9, 1-11.
[0480] 43. Remy et al. (1994) “Gene Transfer with a Series of Lipophilic DNA-Binding Molecules”, Bioconjugate Chem. 5(6):647-54.
[0481] 44. Sentmanat et al. (2018) “A Survey of Validation Strategies for CRISPR-Cas9 Editing”, Scientific Reports 8:888, doi:10.1038/s41598-018-19441-8.
[0482] 45. Sommerfelt et al. (1990) “Localization of the receptor gene for type D simian retroviruses on human chromosome 19”, J. Virol. 64(12):6214-20.
[0483] 46. Van Brunt (1988) “Molecular framing: transgenic animals as bioactors” Biotechnology 6:1149-54.
[0484] 47. Vigne et al. (1995) “Third-generation adenovectors for gene therapy”, Restorative Neurology and Neuroscience 8(1,2): 35-36.
[0485] 48. Wagner et al. (2019) “High prevalence of Streptococcus pyogenes Cas9-reactive T cells within the adult human population” Nature Medicine, 25(2), 242
[0486] 49. Wilson et al. (1989) “Formation of infectious hybrid virion with gibbon ape leukemia virus and human T-cell leukemia virus retroviral envelope glycoproteins and the gag and pol proteins of Moloney murine leukemia virus”, J. Virol. 63:2374-78.
[0487] 50. Yu et al. (1994) “Progress towards gene therapy for HIV infection”, Gene Ther. 1(1):13-26.
[0488] 51. Zetsche et al. (2015) “Cpf1 is a single RNA-guided endonuclease of a class 2 CRIPSR-Cas system” Cell 163(3):759-71.
[0489] 52. Zuris et al. (2015) “Cationic lipid-mediated delivery of proteins enables efficient protein based genome editing in vitro and in vivo” Nat Biotechnol. 33(1):73-80.

The application's sequence listing, which the Patent Office published only in electronic form, follows.

SEQUENCE LISTING (805 sequences)

SEQ ID NO: 1 - protein, 1060 aa, Unknown
  Synthetic sequence or sequence of unknown origin
MKLNRWRLGLDLGTNSIGWSVFSLDKDNSVLELVDLGVRIFSDGRDPKTKEPLAVARRTARSQRKLIYRRKLRRKQTFRLLQAQGLFPATKEECLELKSLNPYELRIKALDSKLEPYELGRALFNLSVRRGFKSNRKDGSREETAEKKPSDEIKTQADMQSHLEKAIKENNCRTITEFLYKNQDENGGLRFAPNRMTYYPTRKMYEEEFELICTEQKKYYPDVDWDVIYKSIFYQRPLKPQARGYCVYETDKERTFKAMPCSQKLRILQDIGNLAYYDSATKTKIELNDNQDSILYELLNSKDKVTFDQMRKALKLSDSNSFNLEENRDFLIGNPTAVKMRSKNRFGKLWDDISLEEQDLIIETIITADEDEEVYKVLEKYDLTQEQKDFIVKNTILQSGTTMLCKEVSEKLVKRMEEIADLKYHDAVDSLGYKFADQTVEKYDLLPYYGKVLTGSTMGVNYSEPESNPEKRYGKISNPTVHVALNQTRVVVNALIKEYGKPTQIAIELSRDLKNSVAEKAEIARKQNQRAKENIIINNDISELYNKAFPGKTFYPNRNDRLKYRLWKELGLGSKCIYCGKGISASELFTKEIEIEHILPFSRTLLDAESNLTVAHSSCNAFKAERSPYEAFGSNPKGYNWTEIVQRANGLTNTSKKNKFSPTAMDSFEKDSSFIARQLSDNQYIARSALRYLKCLVENPSDVWATNGSMTKLLRDKWEMDSILCRKFTEKEVTQLGLKPEQIGNYKKNRYDHRHHAVDAVVIGLTDRSLVQKLATKNSHKNNRIEVPEFPILKTDMIEKVKNIVVSFKPDHGAEGKLSKETLLGKIKIHGKETFVCRENIISLTEKNLDDIVDEKIKKLVKDFVAKHKGEKIENILTQFSQETGIKKVRCVNRVQIPIEITSGIVPRYLAPEDYFAAIIWELPGEKKTYKAQYIRRNEVEKDSKGMNIVRKQVIEKGKPHPAAKYICLIHKDDYLEFTDGGKMHLCRVAGYSATRNNLDIRPIYSVSYCADWIFSTNENMLENYWKPSPGQNWVSVNVLFSQLQAHLVTVNPIGRVFRK

SEQ ID NO: 2 - protein, 1091 aa, Unknown
  Synthetic sequence or sequence of unknown origin
MSYAIGLDCGIASVGYAVMDLDEKGNPKRIIRLGSRIFPSAEHPKDGSSLALPRREARSTRRRLRRHKHRLERIRYMIVDEGILSQEQLDVLYSEPVSDIYMLRVDALDRPLTNEEFARVLIHLAQRRGFKSNRKVDKEDKDDGKLLTAVSGNTLLMKEKGYRTVGEMFAKDEKFSSQKRNKAENYTNTVSREMVEDEVHKLFAAQREFDCPFANETVENRYVNILFSQRSFEEGPGGDSPYGGNQIEKMIGRCTFFPEEQRAAKATYSFQYFSLLQAVNHIRIVSDGSIRTLRSDERKNVLEAAFQTDGLTFKRIRAVLGLSENDRFRNVYYRSDDKEEWESKTKFQYLHAYHEMRKRFDKLKKGHISIVSRTDLDEIGYALTVFKTDDKIISYLKEHTSLDKSEIDAVLMMPSFSKFGHISVKACKAIIPSLEQGMTYDKACENAGIKFQGHDSDGKTRYLPANPNDAPELEDINNPVVRRAVSQTIKVINAIIREQGESPAYLNLELAREMSKSFQDRQEIKKSHDQNNARNEKIKQEIADNFGKVNPSGQDILKLKLYHEQQGVSLYSQKVIAYDRLFEPGYVDIDHIVPYSICFDDSFRNKVLVFSNENREKGNRVPLDYLRGEEANNFVVYVKANVKDYKKKQRLLRSRPTEEDIKEFKERNLNDTKYLSRFLLNYIQDHLQFSESGSDKTKRVTSVNGSVTAYMRKRWGINKIRENGDLHHAVDAAVIACVTDGMINRISRWSKYHETEYEEFEGESYAVDPRTGEVLDRFPLPYPEFRKELDCRLFDNEKHMHEALTRLSNYRDVELSTIHPCFVSRMPNHKVTGPAHQDTVRSPRHYEEDGIVIAKTALQNLKLKDGEIEGYYKPESDRLLYDALKARLVEFGGDAKKAFKDDFYKPKSDGTRGPLVRKVKTFKKSSLNVSVNNGKGVADNGSMVRIDVFFVEGDGYYFIPIYVADTLKEELTNKAVVAHKSYDEWREMKEEDFQFSLYPNDLILVKKASGAIPLTINLKDSTLPPKIEKSEVFLYYRKSGIAGATIVCDNHDGSYYVTNLGIKTLASIEKYQVDVLGNYYKVGKERRQSFR

SEQ ID NO: 3 - protein, 1088 aa, Unknown
  Synthetic sequence or sequence of unknown origin
MIPYAIGLDVGISSVGWAAVALDEAERPCAILDMGSRIFDAAEQPKTGASLAAPRREARSARRRLRRHRHRNERIRRLIVNAGLLTEEELTTLFDGTLEDVYSLRVRALDEPVSKPDFARILLHLAQRRGFRSNRKSASDKEDGRILAAVAENTMRMAEKGYRTAGEMLLCDPAFAQQKRNKGGDYTTTISRDMVAEEVKTLFASQRNAGSAFAAPELEEAYLEILLSQRSFDEGPGGDSPYGGSQIERMVGKCTFFPEEPRAARACYSFERFSLLQKVNHIRLQKDGESICLTEGQRRKLIELAHKSASLDFARIRKTLELPAEYRFNVVSYRTENTPEEAEKKEKFNYLKGYHSMRSAIEKVGKGRFALLTAEQRDAIGTILTLYKADERVRSELMAAGIEACDAEALLSIGGFSKTGHISLKACRLLIPFLEQGMNYNEACAAAGLDFHAHEDDGRSEYLHPAEDDFADITSPVVRRAISQTVKVLNAIIRRYGPSPVFVNIELAREMAKDFSERKKLEKENKENRAKNERILERIRTEYGKNNATGLDLVKLKLYEEQGGVCAYSQKQMSLQRLFEPNYAEVDHIIPYSLSFDDSYRNKVLVLTEENRNKGNRLPLQYLSGKRREDFVVWVNSSVRDYRKRQKLLKERLTEEDEKQFRERNLQDTKTMSRFLLNYIQDNLLFAPSACGRKKRVTAVNGAVTSFMRKRWGITKVREDGDLHHAVDALVIACTTDAMIQQVSRYAAFRECRYMQTETGSLAVDEQTGEVLREFPYPWPQFRRELGLRLSNDPVRLLRDMRIPFYDEHDIVPKPLFVSRMPRRKVTGAAHKDTVKSPRALDEGSVVVKRPLTDLKLKDGEIENYYRPESDRLLYAALKARLAAFGGDGAKAFAEPFYKPRHDGTQGPPVKKVKLCEPSTLNVAVHGGKGVADNDSMVRIDVFHVEGDGYYFVPIYVADTLKPELPDKACVAFKPYEEWKPMRVEDFLFSVYPNDLLRVTHKRTMKLSKTNKESSLQDSVEGKSMFLYYISAGISSATISCRNHDNTYEIRSLGIKTLEKLEKYTVDVLGEYHKVEKEPRIPFTQKRS

SEQ ID NO: 4 - protein, 1050 aa, Unknown
  Synthetic sequence or sequence of unknown origin
MKRKCGIGLDIGIGSIGYVVISRTNNFDARIEDLGVRVFDSGENIRKKASNAQERRGYRSVRRLLRRRKHRKERVKKFFLKIKLMNEIQLKAWEERNGDQNVLQTRIKGLSEKLKPEEILDCIIHICNHRGYREFYDEDSCNENINKDDLKKIEGGLASFDELYQHGNYKSVAEMILKDPVFKTETTFVDYRNHKNNNRYVLIKREFVKKELENILHQQSKYYPQLTENNIKIICDNMVFIQRDFETGPGNENDKTRRFMGFIDSIGKCMYYKDEKRAYRSTVIADIYALVNCLSQFSFINTETGEILLPDNAATKIIDTALLNAAITENDIKNILKPYHLEMRKPEKLQVKVPDTVRTLKILKSVLTNAGYKYEELIKEKQFDVNNPSKLHQLCLLLSENITPARRTRVLKAKGWNEKLQKEVIRKKFGGTASVCEKYMIDAIEAFKRGETYGNFQARMLKEREETLSESKKQKFLSPFDKKIDEELIKNTVVFKSVNETRKILNELIRRYGSPEYINIEVADDLGRSFKERSKIIKRNNDKQKDREKIKNKLIELGLRKEGEVKPFDIERYRLWEEQEGRDLYTGEAIPLEKILSGIYDVDHIVPFSLILDDSLQNKALVNLGVNRQQKGQQVPLAFLNVVDKIDYLKRVNVLYKNKKISTKKYKYLMLPNLYANSELLTEWKSRNINDTRYITRFLVNYLSANLLFDSTKTKNVFGVKGIITSKMRKLWLNKKTWGDEQKNRDNNLHHAADALVIANLTPAYLEIASDKIKLDRIYKDYHKKISNEYLTYLSKSVNKMVKYYGFNKEYAEKLLGTPNSRIPAMIRNIADEADIRLWDNSIEYYKDVSEEQFYKNVKAFYNDDTAFAKSVKPVLVSYKQNRKYQGKFTKDNPLKKNEIKGAFIEKIDSLGNVNILDAKEYYCAELYKNLQGQTILRGIRYVDLQKKNKKLYIISSYPEDYKKHIMYLFANDYIKVFDNDGKIKFNGYYKSIKNVNRNAIYYKNNNSNILEEKTISKKDVVKKYSVDILGKIGGEIKCSVPFLSLEENI

SEQ ID NO: 5 - protein, 1082 aa, Unknown
  Synthetic sequence or sequence of unknown origin
MSYGIGLDIGIASVGWAIVDLDQNENPMGIIDLGARIFDAAENPKDGASLALPRREARSARRRLRRHRHRMERIKRLLVSSGIISDVDLEHLFDGQLQDIYELRAKALDYSVTNKEMARILLHLAQRRGFKSNRKAENSSKENGELLTAVSANTERMREKHYRTIGEMFYKDEVFATYKRNKGENYLSTVQRDMVEAEVHKIFDVQRTLGNNQFTKEFEDAYKGILLSQRAFDEGPGGNSPYGGNQIENMIGICTFENVRQGKEKNEQRAAKSTFTFEYFNLLQKVNHLRLVVDGKNIPLDDEQRGIIIKLAKTKADLKYSAVRKALGIADNILFAGLNYADNDVVEYEKKQKFDVMKYYHQMRKALDKVEKGRIAKYNPEQLDAIATILTKFKGDDRRRECFAAIGIDTKDVDQLLDITGVSKFGHLSIKALSKIIPYMEKGALYNEACEAAGYDFRAHAGGTKDKLLPAYMEEMDDITSPVARRAISQTIKVINAIIRKQGESPIYINVELAREMSKNFKERGEITKKNEENRAANERLMEEIKTNFGVDNPTGLDLVKYKLYKEQDGITPYSQQALDLSRLFEPGYVDVDHIVPYSISFDDGYVNKVLVLSSENREKGNRLPLVYLQEKFGQQAADNFEVWVTNNVKNYRKRQKLLKKAITEEDINKFKERNLTDTKTIARFMLNYIRDYLEFAPSLTDKKKRVTAVNGAVTAYMRKRWGIAKVRADGDRHHAVDALVIACTTDKMIMEASWYSNIQETETNRELLQQKFPLPYSDFSRELSARLAPNPVAALTQQNLLYYIDKDLNDYKPIFISRMPRHKVTGAAHLETIRGVKMLDEGCTVAKVELTALKLNKDGEIDGYYNPSSDLILYNALKARLQQFDNDAKKAFAEPFYKPKSDGTPGHLVKKVKVFKKSTLNVAVHKGNGVADNGDVIRLDVYHIADDGYYFVPIYVANTIKDLPNRAVVNGKSYKQWKLMKPEDFIFSLYPNDLIHVVSRNEISMSRVCAESTLPEKKECKEEWLYVQQGFAGTTVTVINNDNTYIVKSLGLRKLQLLEKYQVDVLGNYVKVEKETRQKFK

SEQ ID NO: 6 - protein, 1082 aa, Unknown; identical to SEQ ID NO: 5
  Synthetic sequence or sequence of unknown origin

SEQ ID NO: 7 - protein, 1065 aa, Unknown
  Synthetic sequence or sequence of unknown origin
MRLVLGLDIGIASVGYGIIDIETGDIITSGVRLFTEADKKNNEGRRSFRSGRRLLRRRKLRKEELKELLKDNGVYEWDSSLDPYICRVKGLNEKLSNAELTTSLLHICKHRGSSLETVEDENNKEDGLKNVLTENDNLIKQGKYVCEIQLERKEKKGKIRGINNNFRTKDYDSELLKILSNQGLDENINKKIEDIITRRRHFSVGPGSFISQTIYGQVYNEDGTVRENMIEKMTGKCSVYPDQLRSPKSAPSAIFFNLLNDLNNLRVADEPIDVDKKQELIKEAFEKKSLTPLKVAKVLGVNLDDIEGFRKNEKSLPILTDLADFKIMVNIFEKNGYIIKVEDLELLDEIAVIITKTKVKKERIDEIKIKGVVNEKILDELSDITRFTGYHSLSLKAIRELNKELYETTYNQMEILSLSNHFEFIHSNFSQKGKKKIAINQDAILSPVAMRSYCQAIKVVNAARKKYGEFEAIVVETTRDKNSYEEKKRIKEENDFFAELNKNAEELVKGYNVKLDGKLRTKLRLYLEQDCKTGYLQEPIDLPLLIKDPTAYEIDHIIPISISLDDSYNNKTLVTRYENQKKGNNTPIKAYESDNFLNKDVNEYKKFIASIRNKQSGISWKKYNNYMYSKDITKYEVMKEFIARNLVDTSYANRLVFNTLTRYFKDNGINTKVHTIRGSVTSAFRKLVKGLEKDRDKDYSHHAIDALIVASVKKMNLFDKLLTDFSIADDGKNVIINKDTGEISKIDDDLYFKDAPFLKFLKSLLRYKVTDYSYQIDTKPNRSIADQTIYSTRNVDGKDYTVKKIKNIYDPKATTLADDIVNGVTGKYLMEKNDSQTYQKIVDIVNYYAKEYRGSDKLKDDKGKKKFVTNPLKEHLDETGEYITKYSVNNKGPVITSMRYFDGELGSHIDISQNYKNIGDKKVVLLQISPYRTDFYKDEGIYKFVTVRYSNIKYYKKDDSFVINEQWYLQEKRKKAISENAEFCFSMHHNEYIEIKSSDECNLYRFTATNNDKANTIEVKEIDRYEKKQNIKTIGKKIVELKKYSCDSLGQLREVKNARLKLRLK

SEQ ID NO: 8 - protein, 1048 aa, Unknown
  Synthetic sequence or sequence of unknown origin
MEQKLNYVIGLDIGIGSVGWAAINLDKRRIEESGVRLFDSGEVLDQNKRKRTSQQRRGYRSTRRLVRRRAHRTERMKQWLEKIGLVSAETLAEYYEAPTAHPLELRVRGLTEKLAPAELAAALLHIGKHRGFNEFYQLDEEEKKSLSKEEKEDRSRAEAYERLIQVMPGMAPAQLYLSHPMFMSEFGVRYRNTKKQDESKKVLVPRTEIEKETHRICEKQASFYPCLTEQNREKIYEILFRQRDFEDGPGDPNDETRQYKGFLDTIGNCRFYPELKRGARQSVLGDLFVLINRLSQNRYFSAETGEVVDSADAYREIIETALLNGSLEMKEVGKILKNYGIEMLNANEEKADSPNRCLAFIRMIKPILENNGYDWDAVIRAEYPFTPYNEDSFLNRVGKILSENRTPQRRVDLLKKAGVSEGIADALAKRKTGGTVSVSDRYMLESVEAFMNGELFGNYNARREKDLLAQVRTGKKYKKLPPIEKGDYVDNPVVFRSINETRKVLNAIIEKYGSPNAINIEIAADLSRTFLERDLMRLENNRNRIETERIQKKIAELLHTKDEIMPVQVERYRLGEQQGWKCPYCGAPITMETAIQKDERSYEIDHIVPYSLILDNTQHNKVLVHHGCNQAKGQRTPLMYLSADAAKKKEFIKWVNAAYAKKQISKRKREYLLQPDLNDEQMQEWKTRNLNDTRYIAKYLVRYLNDNLLFDSEEKNNVYAVKGAITSQLRRVWLNKDTWGGDDKSELRKESNLHHAVDAVVIANCMPGYIELAEEALRLRRMYHEEGKRETENWTAVLNNAVDRLYRYYRMPKAYAEQMLRNIKRIPSFIPDLSEEVDARFCDCGLENEKQYRSKLRAFYADDLAFAAGIRMPLVSYKPNRKATGKITADKAVKKGTSQSLLVKKIAEDNTTTLDDASYYCTEVYRKKDGTLGLRGIRYSMLKRDNGKIILNEQPPENYAVHIMYLFKNDYLRIYDKNNKIKFEGYYLSVYDMKAQRIYTADRIKGRNEKSVGILKNDRVEKLDVSILGDLGGIQSCGKPFLSEVTRS

SEQ ID NO: 9 - protein, 1485 aa, Unknown
  Synthetic sequence or sequence of unknown origin
MKNILGLDLGTNSIGWAVVSKSDDGKYTQDIKLGSRIIPMSQDVLGKFDSGVTESQTAVRTSYRGMRRLRERCLLRRERLHRVLHVMNFLPEHYDNALGWNKNQNSTYGKFLNHGEPKLAWRKDETGKMQFLFMDSFNEMLADFAKHQPGLLAGDKKIPLDWTLYYLRKKALTQPISKQELAWIILNFNQKRGYYQLRGEEEEQEKKNKLEEYYKLKVVKVEATDEQRGDSRWYNIHLENGWIYRRASKMFLDEWVGKEREFIVTTDIDENGNPKLDKEGNVKRSFRAPGADDWALQKKRTENSIDSSHVTVGEYIYDNLLKNPSEKVRGKLVRTVERKFYKEELKRIISKQTEFIPELRDKALLEDCIRELYARNIPHQDSLKKKDFVYLIVDDLLFYQRPLKSKKSLISDCPYESYPYVDKSTGEIKTQHIKVVAKSNPYFQEFRLWQFIQNLRLLDRESLNEDDVTAKYLQTPEDYTKLYQFLNDRKAITQEQLLKDFFGLKKPKGKDTKYSLRWNYVEDKEYPCNETRYLILSALKKAEIEPSFLTREMEQRLWHLLYSVEDKNELIHALEKLQKELELPNSFVEELKKIPSFKKEYGAYSEKAVKKLLSVMRMGTCWSEDGIPASVKERISTIIKGEAQDVALEKAANQHISLAELKDFQGLPVWLACYVVYGRHSESSEITRWETPEDLMIFIRNFKQYSMRNPIVEQCVLESLRTVHDIWVKYGHIDEIHLELGRNMKSTAEERARISERNLANENTNQRIKYLLMELKNDGNISDVRPYSPMQQEILRIYEEGALTELSREDPDFAEISRISKLAQPTSSELTKYKLWLEQRYRSPYTGKPIPLSRLFTPAYQIEHVIPQSRFFNDSLVNKVICEAEVNGLKSNMLGLEFIKAHGGEVVHCPTLGNVTVFTEEQYTKFVKDHYSANRAKLKNLMMEDIPEEFIQRQMNDSRYISRVVKQLLSNVVREENEAEATSKNLIPCTGGITDRLKQDWGLNDIWNKIVSPRFQRMNDLTQSDAFGHWEDKDGKKVFQTTMPLELQRGFSKKRIDHRHHAMDALVIALASRNIVNYLNNESANDEKLRHDLKRLLCGKGGVILKPWETFTQDAYKALQDIVVSFKHYIRVINKASNYYEHYDENGKKVTVAQKGESMWAIRKPLHKETVFAHVNLRRVKAIPFNKALENPSTIVNKDLKHLIKTLMEDGMDKKKVLNFFKKEDGLKFHGQDISKVEVYYFTDDVEKMVAVRKPLDDSFDAKKIQSITDTGIQKILLNYLATKYNDPKVAFSPEGIMEMNEHIEEFNGGKPHQPILKVRVSETLGEKYPVGYGSNKDKKFVEAQSGTNLYFAIYENKAGDRNYQTIPLNIVAERMKQNLPPVPGVNENDKLKFFLSPNDLVYVPEESEQNAGIDELYKERIYKFVSSTKTQAFFIPSNVASVLMNKVEFQSLNKAERAIDGQMIKAVCWKLEVDRLGNIVKIIK

SEQ ID NO: 10 - protein, 1361 aa, Unknown
  Synthetic sequence or sequence of unknown origin
MKRVLGLDLGTTSIGWAVVDQAASQEEKSKIIQLGVRVNPITVDEQSSFENGKSITTTADRTLKRGMRRSLQRYKQRREHLVGLLKKHGIINDDTLLNENGNATTFQTYRLRAKAAHEEISLEEFARVLLMINKKRGYKSNRRADSQEDGELIDGMAVAKKLYNEHLTPGEFAYHILQSGKRFIPSFYRSDLQNEFDKIWNCQNQFYPQVLTAELKDKLTDRSKKDTENIFFAIHHISSATVKDRKTATLTIYKWRVQALRQQLDLEQVVAVLASLNGAIAGASGYLGHISDNSKELYFGHMTVGEYLMRGLEQDPHFRVKNRVFYRQDYLNEFEQIWETQRRFHPELTAELKEKIRDTVIFYQRKLKSQKGLIAYCELEGREITVKVDGKEKRVMTGPKVCPRSMPLYQEFKMWQVINNLRLQSKIDGTQVPLTMEQKKLLHDALNVEGDMQAARVLKVLALKPKDYGINCDEVPGNTTNAALFKKYKSIVEWTGHDVEKFDKLSASEKIALVESVFKALKFNTDFLGDGCDEQSKAFRLWHLLYSYEGDNSNTGIDKLVDHICSLTALPADYAKAVAQVKFDDDYGSLSAKAIKKILPYMQQGMMYSEACEAAGYRHSKSSLTREEIAAKQLLQHLEVLPKNSLRNPVVEKILNQMVHVVNACQDAYGPFDEIHVEMARELKLTSKQREERTKALNQRTKETEEIKQKLIKDFNVPHPSRNDIIKYRLYMELAPNGFKTLYTDTPISHEKLFTREFNIEHIIPQAKMFDDSFTNKTLETAEANLDKSKMTAYDYVLSRQGEEGAKRYKAKIEKLFGASNPKKCERLLMRETDIPDGFLNRDLSDSQYIARKAKEMLGKITRVVVPTTGAITARLREDWQIVDVMKELNLEKYEKLGLVETYSDRDGRCVKRIKDWSKRNDHRHHAMDALAIAFTQPSHIQLLNHLNAHESDDIKANAYALMRRTLTKGGTFIPPMENFRTVAKKHLEAVLVSIKAKNKVVTPHVNRIKGSAHHQLTLTPRGQLHKDFFYSKKYFYATKVEKVGKSFNAAKIATVCKKTYREALLRRLQEYGGDPAKAFTGKNSLLKNPLYVDESNMKVVPSKVKTVTMEEFFSKRNLVDKDLKIDDVVDEGIKEILRKRLDEYGDVNEAFANLRDNPIWFNKQADIAVKRVTTKERITNPIYIHEKRDNAGRFILDEKGNRRPNDFVNPRNNNHVAIFEDEDGNLHEHIVSLYDAVNLARKGLPIVDKLYNSDKGWKFLYTMKRNELFVVPDLEHGFNPAEIDLMDVKNYPAISKHLYRVQKITKKDYFFKLHIDTTSEFQAPLKDIHWKRITKENDLKGFVKVRVDHIGHIVAVGEYN

SEQ ID NO: 11 - protein, 1108 aa, Unknown
  Synthetic sequence or sequence of unknown origin
MKYKLGLDLGSTSLGWAAVKLNDAGAVEQLLDFGVRIFPDGRDAKTHAPINVVRRAARTMRRRGDRVKLRKKRVLQLIRKYGLDFDIRSNPILENPYELRVRALEHRLSPSELGRVLFHLALRRGFKSNRKETKGENGGKLKAATDALASTVGDGTLAQFQVQTKKFRFSNQFDGNVIKDGALYPTRDMYLDEFHRICDAQGLDKEMRAAFENAIFFQRPLIPPVVGTCIFAAGQPRAHKFEPVFQRWRALQQLNQLAILDNGQNVALTDQQRQCLVDILLYNFNGVKRDRGGRVKITFAEIKKQLGLSRTVKFNLESEQRKELNVDSTGFSFAEIGELDFWRSLTDEQQSDVLNKINDDQTEDAELIEYLVAHYGLSASRARAIIDIPLEDDVANVSVVAMKKMLPFLEGGQLYHLAVHSAGYHYGEQDVPLMDKLPYYGDLDVLKPSLMPARDGAYRTMNATVHIAMNQIRVVVNDLIERYGRPCAINIELGRDVRAGAKERAELDKQQSANKRKNDAIRAELAEIGILNPSREDFQKYKLWENLAPQPQNRRCVYTGEPITSLAALFKSGRFEIEHILPFAQTLDDSLANKTISAVAANRFKGNRSPAEAFDDPASPWAYADVWARAQNLPDGSRWRFDRDAMEKFTRHGDCIARALNDTRFMSVMAVNYLKHICSDKNKVRGLPGRLTAIFRDMWHLDWWKNHDDADTYRASHIHHAIDAFVIACMGAGNLQKLAENATHLEDFHGKTLKEKHRQLFADMYLPFPEFDYYDFRMRCEACVISYRPSVKEPAASDTVGCLHEDTAYKLEKFETGTRATMSRRIALPTTADARAKFKKDFDSLNPKTLEMFLAETGVANDANDIADQFLNWCQMRGIKKVRMFKTRVDTTTYVPVFRNRGDKNAFNRAWTEWYAAAGIARGMTEPKAKKAQQEKERRLLALYQNAAARAYKWFVSGNNFCADIFEIRSDDRRYPALAGQWQSEIISNYCATLNNGTPMWRCKYATARRVMRLRINDMVMAEFSRDNVPLLKGLEDAVRHQLAVQDTDTVNIIFRVKKISSNGAIFLRPHYIAKEDADTKTWQANATSLQKYKARKIRVSPTGKVLE

SEQ ID NO: 12 - protein, 1348 aa, Unknown
  Synthetic sequence or sequence of unknown origin
MSIKSDYFLGLDIGTDSIGWAVTDPEYHILRRKGKALWGIRLFDAANTAAERRTFRTSRRRIQRRRQRIRLLQELFAEEMVKLDPGFFQRLSDSAFWQEDKQEQQIYSLFTCENYTDVDYYREYPTIYHLRSALIQEKKEFDLRLLYLALHHLMKHRGHFLFNGSINNVTSFHTTFQTFADCLYDEFDIELECDSEDRFAEILKDKHARKTGKCSELEIICHIEKSNKQLKELFKLITGMKASLSVVFGDDELAEIEHNKISFSESSYDEVRLALEDEIQERTGILDIFHAVYSWAILADILEGGEYEGNSYLSVAKVSTYKKHGDDLRLLRTLVREYCPDHYKSFFSVSGKENYCAYAGTLKKNGKKQPIKRCSQEDFYKALKKLLNQMPTEQPEVKDIFIEIENGTFLPLQVSKDNGVIPYQVNKMELEKILQNAEEYLPFLKNIDEECGKTVSKKIIDLFEFRIPYYVGPLNTAKGENCWMVRKEAGRIYPWNFDEKVDRDQSAEKFIRRMTNQCTYLIHEDVVPKNSLLYSEFMVLNELNNVKIRSEKLPVELKQAIVLDLFKKQKQITGKKLLNYLNANGYDVKKEDLSGFDGNFKSSLSSYLTLKKVFGEELDKYSVQQMAEDIILWITLYGDDQKMLRRVIRKHYEQQLSEEQILSLSKLKFQGWGRLSRRLLSEMEGVDCETGECMTVMQGLRNTQNNLMQLLSQQFSFMELIEEENGNYYVDEITYDNLVKDMVISPSVKRAVWQTVQIVEEIKGVMGCQPKKIFVEMARSDEEKKRTVSRKDRLLEAYDAIKDEARQWQEELQKYSDGDFKAIKLYLYYTQMGQCMYTGRKIDLSQLNDATVWDRDHIYPQSKTKDDSLDNLVLVDRSVNAKKSDGMLSPEIQQRMRATWKYLKEKKLISEKKYERLTRVSPLTDEELAGFINRQLVETRQSSKAVATLLKRVYDEAEIVYVKAEAVSNFRRDNLDYIKVRDLNDYHHAKDAYQNIVVGNVFHEKFTSNPLRWLKNNPNTKYSLNQMFNFDLEKNGVVIWKRGKAGSIKCVEETLKRNDILFTRYAFCNKGGFFNQMLTAAPEDKTKAKGLVPIKKGMETWKYGGYTSVTPSHFMLVASKDKKGKEIRTIETVPLYRWKEFKENPDALLQYCREFYGLKEPKVLIPCIKKNARLVVNGFPMHLKGSTGKQLILQGAVQLCLNNENIKYLKKVTKYLEYNAQRRDKRTLLEVREVTGINKEENIQLYDVFVDKLSNTIYQYRPANPKDNLIKGREKFIELGLAEQCVVLGEVLHLFQCKPLTSDLTLIGGSPNTGTIKITKTISNCNVVKLLSQSIAGVKVREINLLII

SEQ ID NO: 13 - protein, 1108 aa, Unknown
  Synthetic sequence or sequence of unknown origin
MKYKLGLDLGSTSLGWAAVKLNDAGAVEQLLDFGVRIFPDGRDAKTHAPINVVRRAARTMRRRGDRVKLRKKRVLQLIRKYGLDFDIRSNPILENPYELRVRALEHRLSPSELGRVLFHLALRRGFKSNRKETKGENGGKLKAATDALASAVGDGTLAQFQVQTKKFRFSNQFDGNVIKDGALYPTRDMYLDEFHRICDAQGLDKEMRAAFENAIFFQRPLIPPVVGTCIFAAGQPRAHKFEPVFQRWRALQQLNQLAILDNGQNVALTDQQRQCLVDILLYNFNGVKRDRGGRVKITFAEIKKQLGLSRTVKFNLESEQRKELNVDSTGFSFAEIGELDFWRSLTDEQQSDVLNKINDDQTEDAELIEYLVAHYGLSASRARAIIDIPLEDDVANVSVVAMKKMLPFLEGGQLYHLAVHSAGYHYGEQDVPLMDKLPYYGDLDVLKPSLMPARDGAYRTMNATVHIAMNQIRVVVNDLIERYGRPCAINIELGRDVRAGAKERAELDKQQSANKRKNDAIRAELAEIGILNPSREDFQKYKLWENLAPQPQNRRCVYTGEPITSLAALFKSGRFEIEHILPFAQTLDDSLANKTISAVAANRFKGNRSPAEAFDDPASPWAYADVWARAQNLPDGSRWRFDRDAMEKFTRHGDCIARALNDTRFMSVMAVNYLKHICSDKNKVRGLPGRLTAIFRDMWHLDWWKNHDDADTYRASHIHHAIDAFVIACMGAGNLQKLAENATHLEDFHGKTLKEKHRQLFADMYLPFPEFDYYDFRMRCEACVISYRPSVKEPAASDTVGCLHEDTAYKLEKFETGTRATMSRRIALPTTADARAKFKKDFDSLNPKTLEMFLAETGVANDANDIADQFLNWCQMRGIKKVRMFKTRVDTTTYVPVFRNRGDKNAFNRAWTEWYAAAGIARGMTEPKAKKAQQEKERRLLALYQNAAARAYKWFVSGNNFCADIFEIRSDDRRYPALAGQWQSEIISNYCATLNNGTPMWRCKYATARRVMRLRINDMVMAEFSRDNVPLLKGLEDAVRHQLAVQDTDTVNIIFRVKKISSNGAIFLRPHYIAKEDADTKTWKANATSLQKYKARKIRVSPTGKVLE

SEQ ID NO: 14 - protein, 1108 aa, Unknown
  Synthetic sequence or sequence of unknown origin
MKYKLGLDLGSTSLGWAAVKLNDAGAVEQLLDFGVRIFPDGRDAKTHAPINVVRRAARTMRRRGDRVKLRKKRVLQLIRKYGLDFDIRSNPILENPYELRVRALEHRLSPSELGRVLFHLALRRGFKSNRKETKGENGGKLKAATDALASAVGDGTLAQFQVQTKKFRFSNQFDGNVIKDGALYPTRDMYLDEFHRICDAQGLDKEMRAAFENAIFFQRPLIPPVVGTCIFAAGQPRAHKFEPVFQRWRALQQLNQLAILDNGQNVALTDQQRQCLVDILLYNFNGVKRDRGGRVKITFAEIKKQLGLSRTVKFNLESEQRKELNVDSTGFSFAEIGELDFWRSLTDEQQSDVLNKINDDQTEDAELIEYLVAHYGLSASRARAIIDIPLEDDVANVSVVAMKKMLPFLEGGQLYHLAVHSAGYHYGEQDVPLMDKLPYYGDLDVLKPSLMPARDGAYRTMNATVHIAMNQIRVVVNDLIERYGRPCAINIELGRDVRAGAKERAELDKQQSANKRKNDAIRAELAEIGILNPSREDFQKYKLWENLAPQPQNRRCVYTGEPITSLAALFKSGRFEIEHILPFAQTLDDSLANKTISAVAANRFKGNRSPAEAFDDPASPWAYADVWARAQNLPDGSRWRFDRDAMEKFTRHGDCIARALNDTRFMSVMAVNYLKHICSDKNKVRGLPGRLTAIFRDMWHLDWWKNHDDADTYRASHIHHAIDAFVIACMGAGNLQKLAENATHLEDFHGKTLKEKHRQLFADMYLPFPEFDYYDFRMRCEACVISYRPSVKEPAASDTVGCLHEDTAYKLEKFETGTRATMSRRIALPTTADARAKFKKDFDSLNPKTLEMFLAETGVANDANDIADQFLNWCQMRGIKKVRMFKTRVDTTTYVPVFRNRGDKNAFNRAWTEWYAAAGIARGMTEPKAKKAQQEKERRLLALYQNAAARAYKWFVSGNNFCADIFEIRSDDRRYPALAGQWQSEIISNYCATLNNGTPMWRCKYATARRVMRLRINDMVMAEFSRDNVPLLKGLEDAVRHQLAVQDTDTVNIIFRVKKISSNGAIFLRPHYIAKEDADPKTWQANATSLQKYKARKIRVSPTGKVLE

SEQ ID NO: 15 - protein, 1347 aa, Unknown
  Synthetic sequence or sequence of unknown origin
MINQEYFLGLDIGTDSVGWAAANSEYHIIKKNGKALWGVRLFDSAQTAAERREYRIARRRIERRKQRLAWLQDQFAAEIAKKDPAFFRRLQESKFLEEDKQSNHPLGRYTLFADRNYCDKDYYRDYPTVYHLRKKLMEQPGPFDVRLVYLALHHIMKYRGHFLYGDLAMDSISLKAGMDRLNHVLEQEFEYKLEVSNMEALKEVLISRKGSKTWRKKCLAELLSVEKREDQMGFALAELLAGSSVPLDALFGDGTATEDFKKISLEDDFEEIVPKLEAALGDRIEVVLAAKGIHDWALLETMRDGERYISSAKVKSYQKHEDDLTLLKTVVRQLNDRDMYREIFHTAREKLNNYPAYSGKDANGCRCGYDDFRKYLTGKLKPYKDLYSDIPAILSELEQGTFLPLQTTKDNGVIPHQLHEEELVKILGNASAYLPFLTQVDESGLTKAEQIHRIFCFRIPYYVGPLDSRSEHSWVVRKNDKVYPWNFEQVVDLEACRRNFIERMTRKCSYIGEPVLPQNSLLYTRFQVLNELNNLKVNGEGISVAQKQAIYHDLCLSGKKVSLSKLRNYLNLDKNDEITGIDGDLKGTLSPWKHYAWLIKQPGGYEITEDIIRQITLFGDDRKLLANWLHKTYGNKLTREEEKLALRFQCSGWGRLSRAFLTEIYHGESSTGEAMSIMDMLWETNYNLMELLSSRFDFAGAVQAYREAHLNQYMSLQDYLDESYASPGIKRAIHQVMGIVNELEGILKCPPKRVFVEVAREHGEKGKRTISRKNELLALYQKCGEECDELFQQLSDEPEGSLRRDKLYLYYTQKGRCMYSGEPINLSELDSGYDIDHIYPQSKTKDDSIQNRVLVKRELNAVKSDNYPIAADIRMKMRPFWTKLERAGLISKEKYHRLTRSTEFSAEEQAGFISRQLVETRQSSKIVAELLKQRFGSHTEIVYVKAGNVSSFRQDQRLTKDGQQKQAGQCKQNEQTVQDPLFVKCREVNDFHHAKDAYLNIVVGNVYHVKFTRNPANFLREKNAKFSLSRMFDFDVSRGEDVAWRAGPEGSIAIVRHTMRKNNILFTRRSAEATGGLFDQMIVPKGKGQAPVKASDPRMSIEKFGGYNKLTGAYFILVEHTAKKKRVRSLETVLLMYKEKYEAAPETYCCEILGLQEPKVLIPRIKINTLVSYDGFRMHISGRTGDRIIYKNANQLVMPPDWQQYIKNISKYLERCRTAGRELELTTFDGITDEANLTLYRLLLEKLENGRYRVKYETPAQTLCSCSEKFRRLSVPDQCRILMQILNLFANTAASADLKLLNGKAGIGILLTSKNLDNYRGHSFKLIHQSITGFFEQEIDLMGEMLS

SEQ ID NO: 16 - protein, 1329 aa, Unknown
  Synthetic sequence or sequence of unknown origin
MKNYYVGIDMGTNSVGWAATDCEYHLLKARGQDLWGSYLFDEAEGAQKRRSFRTARRRTARTRQRLLLLQSLFQEEMAKKDPLFFIRLNNSPLVLKDKNESLKTSDSLFADQSFTDKNYFKKYPTIYHLRASLINDKITDVRLLYLAVHHIIKNRGHFLFESQNFNVANEEVVKDKFFAINAFLSDREMPTLNLERLHEVLQVLKQTKSSKRDKQKTLGELLGVSKEKPLTSIVKALIGGTVSLKDLYSAESDFDDIKSFCFDKASFEDLDLPAIKSAVGEDDAELVLLLKSVYDWTVLCGIMGDEEYISFAKVKIYNKHKSDLVWLKNYVRQNFSKETYNEVFRRKDKKNNYAAYIGMDKQKGFSKCKQEDFYAFLKKRLNITDETVLAEMDKGQFLPKQVIKTNGVVPYQLHLLELKAILRNAQKYFSFLSEKQEGVTVAEKIVSLMTFRIPYYVGPLNTASKKYAWAVRRPGYENVSITPWNFHQIVDGDASEEQFIRRMTNKCTYLVGQDVLPANSLLYSEYVFLNELNNLRINGEKNNKARQLIFHYAKQHKRVTLKNCLALLVRNGLLPADSSMDVFSGLDGDFKTSLSTWYDFRFLGDRLQTQREMCEQIILWITLISDKNRLEKRIRTAYGQYLSDEEIKRIKGFNYSKWGRLSKILLDGIVSERCFDENGELLTIIEAMRQKGENFMQLLSDKYGFQDAIERYNQENSPSDDKVSYQTVEDLYCSPSVKRAIWRTVEIVREIVKIQGCAPQKLFLETARETKDNGKAGKRTVSRKQQLLDLYKDIHLQQHDWIKEIESLPDSKFNSDRLVLYYRQLGRSMYSGKPIKLEEVFDRNICDIDHIYPQSKIKDDSLDNRVLVYKNENSVKSDKYPISSEVRNAMRPFWQSLWVQGLISERKYQRLIRSTPLTVDELADFINRQLVITRQSTKATAQILKQILPDTEIVYTKAANANEFKDKNNLLKVRELNDLHHAKDAYINIVVGNVYNTKFNHNAAVFFRNNSIDSYNFNKLYESDIPGAWRVAQKADVLATFQKNTCKVVRMTVNGHGALFDVNPVVAGKNADLVPLKKHGAIADTSRYGGYNSAKIVYFVLVRSDGKAGKQLLSLEPWPLWMEKQTGGSTEAKLNYFSQKLTNPKICIDRIKQNTLLCVNGSYAWLKGKTNNNVSLCNANQLFLDGENVQTLKLISNYMRDKKTFNNPQMPANEKITAENNLRLYDALVQKLSSSLYAGLAICGQVPFLQEKRPVFASLSVEKQCCVLWEVLRLMQCNVGSSDFTLLGGVANAGKITLNKFIQDENIKLIFQSPTGYYRTVVDVGRFLK

SEQ ID NO: 17 - protein, 1363 aa, Unknown
  Synthetic sequence or sequence of unknown origin
MKKTREDYYWGVDIGTNSVGWAVTDENYRLVRFNGKTMWGSRLFDEAQTAEKRRLSRTLRRRLQRRRWRIELLQELFSEEICKVDPGFFQRLKDSTFLPEDKQSHQTNTLFYDTNYTDVEFHREYPTIYHLRKELIQNVEKKDIRLIYLAAHHILKHRGHFLFSGTIENATSFECAFDKMSQCIRDEFEIELNCNIKMDQGKMDDLKKIIQDKKLSKRDKASQFLEYLQYDDKEKQKQIKAIVSLICGSKCKLADIFSDETLKDAERSSISFSESSFDEIRPELEDLLQERCGVLDILKGVYDWSILADILKGGEHNGNSYLSLAKVHIYKKHQKDLFELKKLIRTYADDQYQSFFQKADSSSSKNYCNYIGSTRRNGKRHSVKKCTYEELTKTIKNIFTNIQHPDAQNRIEKIKMELDAGTYLPLQVSKDNSVIPYQVHDIELKKILENAKKHYTFLNKKDEQGITISEKIIQLFEFRIPYYVGPLNTSVGTNSWMVRKKDGPIRPWNFDEIVDENQSAEKFIRRMTNKCTYLIGKDVLPKHSLLYSEFMVWNELNNLKIKNEPLPVETKIKLFTDLFQNQKQVTPKKILEFLKCEGYRVEQKDISGIDQRFKSSLGSYLEMKKIFGDEIRKQSMREIAEDLILWITLYGEAPKMLKKIIRSKYETKQISDKQMERICKLKYQGWGRLSKEFLDGLEGTSTKTGEVFSIISALRNTNDNLMQLLSSNYTFVEEIEKLNYKLTPELTNFSYETIMADLVASPAIKRAAWQVLLIAEEVKKIMGRQPKKIFIEMARGPKEKRPTDSRQKKLLQLYAKIKDESRDWKKELEDRQESEFRSIKLYLYYTQMGKCMYSGEPIDLSRLADTSVYDRDHIYPQSKTKDDSIDNLVLVKRDINLKKSNHMLSPAIQEKMQEFWHYLEDQGLISKEKYRRLTRKSPLTDEELAGFINRQLVETRQSSKVVAELFQRLYNDSDVVYVKAKAVSDFRNEILKVKKCRSLNDYHHAKDAYLNIVVGNVYHEKFTNNPLHWLKKHPSEKEKYNLNQMFNHDVIKKQVIWKCGEKGSLKMVRKQLKLRDIRYTRLATENKCGQNGGFFDSQIVSKTANASVPIKKGMDVTKYGGYKTITPAYFALVTSEDKKGNIQKSIEAVPLYLKEAIEKDINIFIDYCKDTYKLKNPSILLPKIKKDTLFVVNGFPMHLRGRSNNKLVLQCGVQLFLESKYEIYLKNIEKYLLRSQSFHGKELLPITENDGITSMENLEMYDELYRKQRDTIYQHRPASQLETLKKGRDIFTQLPCEKQCYVLNEIMNLMRCKPITANLKEIQGSPHAGSISINKVINRYFQCQIIYQSVTGLFEQEIDLLSL

SEQ ID NO: 18 - protein, 1503 aa, Unknown
  Synthetic sequence or sequence of unknown origin
MSKTILGLDLGSNSIGWAVVKAEVSESGEERLTGIEAAGSRILPMDAKLLSKFEKGNSVSQTETRRKARSARRRSERKKLRRARLLRTLRIIGWLPAHMASAIDDYGNIKRGSEPKMEWDGGNFMFTRAFEEMCAEFSARHPELKSVSHDWTVYYLRKKALREALTGQELAWVLLHFNQKRGYMPSRTDANIPAAKEGEKKEIVDVRVVGCKAAEAAKGRKATKAVTLIFDDGGEMNMPYYGTTPEEMVGRQMELLKTTKEGKTPTYTNPGENDWTFKKEKSKERITSAHKTVGEYLYDSLLEEPDVKLAGGKVTVLDRELYKSELEAILTKQAEFHDELKSPTLLAKCAEALYPNNPGHRAELMRHTMANLIMNDIILYQRPLKSKKSTIADCPFEYRTYMDKTGVEQVQKLKCAPRSHPLFQEFRLWQFVTNLRVTDEQTGNSEDILTDADRMKLFDALTPKSKVKAADVLKIVQKIIKPEESKKEKGAAPECHYRVNMVEGKDYPCYDMRAEIAACLTNKKSGPGLKAGDAYELITQTREEGDMTNEEYLWHISYSVTDPKEFEKAIKKWAETNGLPAEETARAFCALKPNKNYASYSLKAIKRLLPLMRMGRHWSFEAIDAKTRAKIEHFINGEEAEDMTPETMHKWAADKEDGGYDLKQAEESFQGLQPWKACMVVYGKLSGDEGLKWQTADDVREWLDKFPHGSLRNPIVEQVVLETMRVVADVWDKHGRPDEIHIEMARELKKTNAERAEMTRQNAQREEDNERIRKILRELASTCEDVKPFSPIQQARLKICVEGARLVAPAEEPKIEEIEKYKLWIKQNYKSPYTGESIELARLFTSDYEIEHIIPRSRYYDDSFNNKVICEAKVNQDKDNKMAMEYINAAQGKEVDLGGGRKVNILTPDEYVKRINDIYKNNSRKRENLLRTELPQDFNNRQMNDSRYIAVKVKELLNNAVRAEVGDDGAGSKNVVVCTGTVTDRLKQDWGVNDKWNEIILPRFMAMNEKVADKSDRNNRFIAKSNGHLIPTVPTDMLKGFNKKRIDHRHHAMDAIVIACASRAMVQFFSNQSSNKGGNMFENLRKSLCHKDANNVWVVNMPWETFPTDVKNALESITVSIKHRQRIVTRTTNHYTVTKGGRREVRKQATYAIRNSLHQETVWGLVNLQQKEQMSLKDAIKELRTFLSARIDDPQMRPKSQIVCKPLRRRISQLITAGKTDKEILALLDAESDVWSEEIKSGKVSVYTWSKDGGTRICATRFLSSLSDLFSKLTDEEKIKNKIASITDTGIQKILFNHLAQWQGGAATAFSPDGIKWMNENIQTLNGGKPHKPIYKVRRTETSDAKQQIGTNGNRSSKYVEAAKGTNLFFAVYVDDKGKRTFSTTPLRTVISRQLQGQSPVPETIGDNERLCFYLSPNDLVYVPTHGERYIEDRNRIYKFVSCFENRAWFIPAYVAKVIVDKSEFGSQNKIEVIDGVSIKNVCLPVEVDRLGNVTLKKIGEDD

SEQ ID NO: 19 - protein, 1464 aa, Unknown
  Synthetic sequence or sequence of unknown origin
MKKYFLGLDVGTENIGYALTKDYEVMQVNGKRTMGVLSFESANTAVDRRTYRATRRRLDRRRYRIALLQELFNDEIMANDKNFLRRLGDNDLYLVDRNVEGKYSLFNDTDFNDIAYYKQYPTIYHLREKLMMEGTDDIRLLYLAIHHIIKYRGHFLLAGEVSTNEVGGVKQLEELINKLNSKLDENNDENKNNDTTCFFDKFATTALSDVKDLICGTGDITKNMLNQITIGKKYISKRDKKNKLNELFGVSSSKTSKKIIDIVMGGKVNLTELFGKEYYEKEEVKGFTMAEEWESIEDLQLIKDNILHIDIIDTIKQIYDWVTLNEMLKGKQSLSSAMVEIYETHKQDLHDLKEFIKDYAPNDYERVFGEIKNEKGKIDNSICNYSCYIGGGRYNGDKIGANGRYGSTCTQEDFYKFIKKIIESVTVEEATALRDDLLERIANKDFMPKIVSKNNSTIPYQLNMMELDGILDKARQNPKFTFLNDVDNGWTIADKIKSLLSFRVPYYVGPVKEYEDNDNNKRYAWAVRKESGRITPWNFDDKIDKKQSNEIFIRRMTNRCTYLKLADTLPKNSILFSKFMCLNEINSMKINGDAISCKEKKAIFDNVFCKKNPTIKNIKKYLIENFGYEKGIVLSGIDNEIKSSMKTYIIYKNKLGNKVDADPNMIERIIFLSTIHEDSQMLEKSIREEFGDKLTEDEIKAIKGFKFNGWGSLSAEFLTGYKNNGIKLMFDGEMLDIIDIMYEYNLNLQQIIFNEKCNFSEALEAYNLEHNIVEDSNVSYNKDIADYPCSPSVKKCVWQSFKLVKDIVKQTKIVPDVVFIESCRENNDFKKNQRTSKRRDMIVAIYDEARKKINELQRDKKAEFSIQELEGLSEDIDYCQKTLDNYSDSELKKENLYLYFMQLGKDMYTGKAIDLNQVLFGNMYDHDHIIPKAVIKDDSFTNLVLVAKKENAEKLRTYPLESQFRQTTLWKKLYKIGLLSNEKYSRLIRQTPITDEEQEKFINRQLVETSQTVVLLRDLLNRYFAGKNVEVVLSKAGNVSMFRKEFDLTKSREVNDFHHAWDAYLNIIVGNILNKEFNHNWFIRQDNGKDKSYNFLRVLRKQATANNNEILNIIEKTMNNIDFQMVKLPEEKKGNFYSEVLKTHENDKDSSLIPMCDSKIVGGKEIHPKCDTTKYGGYKTANTAYFILADSIDKKGAVQRNIVAISIFDDARIKNGKITYKEIFERIGLKDGKLANVEGMKVPIIKTGSLLDFGAYCLRLAGMTGNRLTFHNANQLFVSKDQNRYIKELGILVDKVVKESKKDTKEDKKEAMALEIIEESIRRKNNPDNKNSNIIVVNRKDNLKLYDFFVYKLSHNPYKDIPTYSSLLDILQRGKEDFEQKEIYAQVLLLFNIIKAFQCNAQKVDVSALSYVNKKGIATKGGTGQCSIAINSDITEIDKLILINQSMSGLKEQRIQLNLKKVDK

SEQ ID NO: 20 - protein, 1148 aa, Unknown
  Synthetic sequence or sequence of unknown origin
MALRYILGIDLGISSIGTALFKILPDATDLNDIHSFEKILDAGVRICPVSEGAANRRNFRSQRNAKKHRKARKKALIALLQEYKLLPLDRSELELGLRSQPYALRAKAMQEPLSNAYELGYCIMNIAKLRGAGFIDEAEENEDEKKKSKTANRYQILEQELKTKNITLSEFLADHLAKNNCVRQRLDFIAEKVPFSVPRYLVKRDYYALMEKQAKHFGISDAQVKAIYSTIFQDFPKAPYANAPCSLLPETGSRLPKMHRLAEELRIYQQCNNIRYNTVEHTDIYQGLTRQMRDALAEKLMQGEGLNKTSIKKILQTFCKEKIKSINCYAQDEEITAIKPFAHVKAFAGIPTFWKLPQQKQDELIEFIADPLDVKAKSAKPVLYDEEKFLQICMEKLQLSGLEGEQKLYAALNLLPKDRTMLGKEASKQILQKLVDGIEVDGEWKAPTYYDAVTACNFTRASAEQKEYDFLPYYGEVLVNDILPIHPWHLERTAEEEKIGRIANPVVHSMLNQLRKVVNEIIALYGKPEMIKLEIARDFGLSKIKRDKLEKQRQANEKYNRTIDAELLRFGYASTPKNRLKYRLWKEQNGKDIYSRQEFKIADFNRYQIDHIIPQEAGGTNSFCNLVLTDKNNVKGNTFAYDFIQAKFPDCWESIKKEMEEMPKHKAWRFTAEAKTRYALYGDETDEDYADRRLQDTRYMAKAALRYLSCICKNILAIRGGMTAQLRHLWGFDGIEYELMGLNVPKERIDTETGEVSVDSNGDAAINPDWEAKPRIDHRHHAVDAMVLCAITRSLAQKMYRADNRNKKIDESIADMPFRKSPKNSELKSFRELVLEMLKTIKISHKPEHDTNTQLHNETAIRILDYDEKDQLYIANYMRSLSNIDSFSKLETIAVAENLGTSPTVRKMRERCAHIINDVSAQRFAAEKSLKQKNTDNAAQGLKEVKITDQALVQEAIRLAKVGNKYPRLEKFTLVNIRKKQQCGYEPASNHRVDFFVYTDGKKKDEIGWECIKSIDAANPNFKPKWQEYGELVWSVCKGDILELHFDKETLLKEKIPMAFVRQNEQQEYCMLAKVLKFTATYIVFVSAFDARADQKNALKENPEPFMRWKSGNCGLSFYCKAKARKVLLSPFGKVNKKLQRLWHGKKV

SEQ ID NO: 21 - protein, 1148 aa, Unknown
  Synthetic sequence or sequence of unknown origin
MALRYILGIDLGISSIGTALFKILPGATDLNDIHSFEKILDAGVRICSVTEGAVNRRILRSQRNAKKHRKARKKALIALLQEYKLLPLDRSELELGLRSQPYALRAKAMQEPFDNPFELGFCIMNIAKLRGAGFIDEAEENEDEKKKSKTANRYQFLEQELKTKNITLSEFLADHLAKNNCIRQRLDFIAEKVPFSVPRYLVKRDYYALMEKQAKHFGISDAQVKAIYTTIFQDFPKAPYANAPCSLLPETGSRLPKMHRLAEELRIYQQCNNIRYNTVEHTDIYQGLTRQMRDALAEKLMQGEGLNKTSIKKILQTFCKEKIKSINCYAQDEEITAIKPFAHVKAFAGIPTFWKLPQQKQDELIEFIADPLDVKAKSAKPVLYDEEKFLQICMEKLRLSGLEGEQKLYAALNLLPKDRTMLGKAASKAILAKLIEGAEIDGVWKAPTYHDAVTACNFVRADEDQKEYDFLPYYGEVLVNDILPIHPWHLERTAEEEKIGRIANPVVHSMLNQLRKVVNEIIALYGKPEMIKLEIARDFGLSKIKRDKLEKQRKANEKNNRDIDEKLLGFGYAPTKKNRLKYRLWKEQNGKDIYSRQEFEVSDFSKYQIDHIIPQEAGGTNSICNLVLTDKNNVKGNIFAYDFIQEKFPDQWESIKKEMEEMPKNKAWRFTAEAKTRYALYGDETDEDYADRRLQDTRYMSKAALRYLSCICKNILAIRGGMTAQLRHLWGFDGIEYELMGLNVPKERIDPKTKLAFKDSNGDVVINPDWEAKPRIDHRHHAVDAMVLCAITRSLAQKMYRADNRNKKIDESIADMPFRKSPKNSELKSFRELVLEMLKTIKISHKPEHDTNTQLHNETAIRILDYDEKDQLYIANYMRSLSNIDSFSKLETIAVAENLGTSPTVRKMRERCAHIINDVSAQRFAAEKSLKQKNTDNAAQGLKEVKITDQALVQEAIRLAKVGNKYPRLEKFTLVNIRKKQQCGYEPASNHRVDFFVYTDGKKKDEIGWECIKSIDAANPNFKPKWQEYGELVWSVCKGDILELHFDKETLLKEKIPMAFVRQNEQQEYCMLAKVLKFTGTYIVFVSAFDARADQKNALKENPEPFMRWKSGNCGLSFYCKAKARKVLLSPFGKVNKKLQRLWHGKKV

SEQ ID NO: 22 - protein, 1423 aa, Unknown
  Synthetic sequence or sequence of unknown origin
MNKILGIDLGTGSIGVSLRNPNLGSSLFEQLEYFSSDIFQSGVGKDKSGEYSLAAERLSHRQSRRLKASRRRRLWATLELLIEYGLCPLDSLLLKDWKTYDKSKALFRSYPNSDKAFSSWIMMDFDCDGIPDYSSPYQLRRELATVQLDFAKAENKRKLGRALYHIAQRRGFKSSKGETMSAQENDSKESFDLSDKDIALEMQKSESKLSQDLKQYMAEHQCHTVGEAFACLEDEGIRVRNSRYAAVRTQYEDEIRFIFDFQNGLSLDSDLFKRLISKKKGVGTIFYRKPLRSQKWLVGKCTLETNKTRCPISHPEYEKFRAFCLLNNIKIRTDYLSDWHPLTVETKRLLFDQIFTKRVKADFPFKDIREKLQILLHQRFDGDCTKERRTINYKDKVSIAGCPVIARLRNLLGDEWEQFHAMGQKQRTSHSKHHIGKHCVEYSAYDIWHICYETDDPEYLTEFALQKLNWDEDQAKKLVRLWSTQAQGYAMLSLKAITNINRFLEMGLIYSDAVLLAKIPDIIPMTNDDIKNLVNVYTDTIKDSITQEKTCNTIVNSLIANYKAMDVTHQFAFHNTSYTLDEADRREVERQIVETIGIKTWGLMDVDEQRQIYDTVERKYQEFFSSTQRDYFKLPKLSDALIEYLTGKYPNIPLRQWKKLYHPSQISLYNVDKVTDSGSEVLRLGSPSIGAMRNPVARKTLNILRRKINAMLDAGLIDVDDTRIVVETTRQFNDSNMRWAIETYQRERENENQEIRKLLEELLPDRKMSESDITAARIAFEQQGVDKYKEKGRVFGIDVSKYRLWKEQGGICMYTGKLISISNLFKEGCFDVEHTIPRSLSFDSSDMNLTMCDTYYNRSIKQNRIPTELPNFEHDAVINGVLYTAIKPRLEAWENRVERLRDNVNFWKAQSRKAFEKSRKDYCIRQRHLWEMELNYWQGKVSRFTMTEVTDGFRNSQLVDTGIITKYATLYLKSLFHNVEVQKGSATAEFRKMLGIQAMDEKKNRSIHSHHAIDATVLTLIPVAAKRQKMLKLYYEIEELKELGLNSDDKKAMLRHEIEECEFEKDVSLIPSYIEEHIVAKHHSEDRTFDHSKRRPDKNNHVAGGDSVRGRLHKDTYYGAIKLPQEIGTGIDRMPMVKDGKFVYPANDAITMVMNVEITSFTSEKDFSIIIDPRVRMSIAKAVEKRLGEGLSFKEAINQPFWMLNDDGIEIKEDKNGKPISPIRHVRCKVKAGRGFMTAEKALEIRQHNFVSTKSNVNVPNKDYKRKVYAQNDTNYLYLLYEGIKKGKVDRKSRIVNLWEATLLKKNYSHQTIDTIIRETSDYNHITEKNVEYRLSAIIRVGDYVLLWKDSPDELRGMDVAHLSTRLYNVVKFNTTSSDRIFLKGHLSATIDPDLSLVSNDFNCLIEHRDFEIDTLGFITFKD

SEQ ID NO: 23 - protein, 1513 aa, Unknown
  Synthetic sequence or sequence of unknown origin
MEDKRNILGLDLGTNSIGWCVISESNACSETEQVRKIEDAGCRIIPMDAAMQSDFAKGNTISQTADRTSSRGSRRLRERSLLRRCRLLRVLNVMEFLPSHYAASLTRYGRFRNHEECKLAWAVGEAGRPYFLFKQSYDEMLQLFWQLHPDLQSNGLKVPYDWTLYYLRHKALSQPITPQELAWLLLSFNQKRGYYQARGEEERDDRSKKEEYYKLKVVDVVDTHTKKGKATWYDVILENGMVYHRAADVAPDWIGKTKEFIVTTALEADGQPKLDKDGQPKRSFRMPGDDDWGLLKIKTQADIRTSGKTVGAYIFNALLANPKQKVRGKLVRTIERDFYRDEIVKILEAQKRFMPQLTDPALYLDCITELYPSNEAYRASISQRDFTYLLVDDILFYQRPLKSKKSLIAECPYESHVFVGPDGQPQQRFVKCIAKSHPLYQEFRLWEFLSHLRIYKSEVDASGRLMDDCDVTAQFLPDDDAYVALFNYLNDLPSIKQKDLLGKYFKIKKPKGTDAELPYRWNYVQDKEYPCNETRGEILMRLKKAGVDASFLTPHEEERLWHILYSVSDRKELRKALQRYADSHALGQEFVEVMAKHPPYASDYGAYSAKAIKKLLPLMRRGSYWRTDHIDPATLVRIQRIIDGEVDDTISERVRLKAMSLTSLEHYRGLPQWLACYIVYGRHSEARDAQRWTHPDDIDRYLASFRQFSLRNPVVEQVVTETLRVVRDIWRVHGHLDEIHIEIGRDLKNPADKRKQMAQKAVDNENTNLRIKALLAEFLNPEFGIQEVRPYSPSQQETLRVYEDVVLHSVDAIPDDIADIMKALSQADAVKRPSHKQVQTYLDWLQDNYVSPYTGQTIPLARLFTRDYEIEHIIPQSRYFDDSLSNKVICEAAVNKLKDNALGYEFIKKHHGEVVEVGENRRVTIYEVDAYCDHVQQAYKHNRAKMKKLLMDDIPDDFIERQLNDSRYISKFVKNLLSHIVREENEQETTSKHLVVCPGSVTDRLKREWGVNDVWNSIILPRFERMNQITGTTHFTTVSSSGHTIPDMPLHLQKGFSKKRIDHRHHAMDAIVIACTTREHVNLLSNEAALSRTNANRYQLSRKLRRYEDTLIMRNGEARKVSVAKEFNMPWPTFKSDLHQALEQVIVSFKQNLRIIGKTSNYTSRFVDGVKKMVKQTKGDDHWAIRKSMHKDTVFGEINLRGIKTATLADAMQRPERIVSTSLKAKVRELLSLGYTPAQAKRYFDDHNDEWPELNTRKIEVYYFSCETSTHVYATRKPLDTSFTEAAIKGKVADTGIQQILLRHLAACQGDPEKAFSPDGIDAMNQHIRSLNGGRFHQPIFKVRVYERAEKFAVGTVGNKKHKFVEAAKGTNLFFAVTEEETLNKTTGLPEKTRRFRTIPLAEAIQKMKAGQPLDAQATFILSPNDLVYVPTEQELADGCIASPLNTSRIYKMVSASGVECCFVPFCVASPIVDKVEFSRHNKMERAVTGEMIKRVCIPLTVDRLGRIIKIGV

SEQ ID NO: 24 - protein, 1383 aa, Unknown
  Synthetic sequence or sequence of unknown origin
MEKQNYYIGLDMGTSSVGWAVTDDSYHIIRRKGKDMWGIREFEEAKTSAERRSHRISRRRLQRSKVRIGLIKMYFDEEIRKVDPFFYERLDNSKYYQEDKDEIVKSPNGVFNDKEYTDKDYYNQYPTIFHLRKELINNENAPYDVRIVYLAVLNLFKRRGHFLNSSLRLDDESAEFSLKDAYSNLLTIMADNLPEELSIAFPEIDSDNTYLELQNILGTREFGRKQKGEKVAKLLGIDRKQKKEMEIVNGMVGLSIDCCKLFDIEADSKITAKFSDFGYAEKEPEILDQLGDNYGSILMAIKTVYDIGSLTEILKGQKYLSFARVEDYEQHKADLRKLKKVVKKYALERYDYFFRQKEDGTYSAYVNSVNSEKYNDLGSKDTKPNRRNMKARSRDDFYKGVKKLLKGMPEDDADVIEINKKIENETFMPKQLTAGNGIIPNQLHAMELKKILDNASGYLDFLNDVDESGFAVKERILRLYTFTFPYYVGPISSGSKTGWAIRKPGFEKGVILPWELDEKIDRTETAKRFIDRMVRRCTYLNDEMVLPKSSLKYERYCVLNEINNIRIDNTRIDNDLKKRLFNEIYLNGKKPGRKKIESFLYRNGVPRDAQVTGIDKELNNALSSYGKFKEIFGDELEKDSVKKMVDDIIFHCTVYGDSKKFIYDYIQKNYPESEYPLLNKKTIKRIIGFKFKDWGRFSEEMLDLQGCNYETGEVYSILTALWETNNNFMELINSDSFEYKKLLEEKSGSAISSLAEVTPELLDEYYFSAPVKKMILQTMGVIKEIVQIMKCEPDRIFIEMTRSDGEKGDKGRKDSRKKALLDLYKNIIDELHDKNYWKDLIENADKDGRLRSKRMYLYIKQMGMDMYTGEPIDLDYLFDENRYDIDHIYPRHFVKDDNIENNLVLVNKASNAKKTDIYPIPGFIKDNPKVWKLWEMLHKRGLINDVKYSRLRNSEPFTDEQKAGFIARQLVETSQGTKGVSDILKQVLPQTKLVYSKAGNVSRFRSDNKFYKSRLINDYHHANDAYLNIVVGNVYYTKFTSSPMNFIKNEYSKDSKKFEYNLDKMFAWKVERDGYTAWIPLKKGNEYIATIKTVEKMLAKNTPLLTRQSFVKSGVINKVTLYGKNTATHETYIPLKMSDPKMQDVTKYGGYTSVNICYFFLVEHEKKGKKVRTIEALPGYLEKKVENDPAELERYCVEGLGLESPSVRYRKIRIQSLLKVDGYYMHLSGKSGNSLIVRNACALSIGKKWQDYIHYIEKSEENGFKYDDSRITKENNIELYDIISEKHIDGVYKKRPCGIGDAVKNGKKKFKELTKENQCKVILQILQISSIGNYKADLSLIGGASMMGNMRISKEITKNEKVMLIHQSVTGLFEDKLVDLKSI

SEQ ID NO: 25 - protein, 1540 aa, Unknown
  Synthetic sequence or sequence of unknown origin
MKHILGLDLGTNSIGWAIVNAEQIVREDETNYLKPVSISSAGSRIIPMSADILGDFDKGNSISQTAERTRLRMARRLRERNLLRRERMLRTLKLMGFLPSHFAKEIDIFGKLFSNKEPKLAWKKNEEGKNLFIFQDSFNEMLEDFACHQPQLVAEGRKVPYDWTIYYLRKKALTQRITKEELAWILLQFNQKRGYYQLRGEDEEDDNTKRVEYLALKVERVEATDEKRGDEVWYNVYLENDMVYRRTSRYPLDWVGKVKEFIVTTDLEKDGSPKKDKEGNIKRSFRAPKEDDWTLLKKKTENDIENSQKTIGCYIYDTLLQKPNQKIIGKLVRTVERKYYKDELLRILRRQQELIPELQDTELYKKCIEELYPNNEGHRSNLAKSDFVNLFVNDILFYQRPLKSKKSQIENCPYEFHKGIDGNLYPVKCIAQSNPLFQEFRLWQFIQNLRIYQRERIITDGQLALFGSTHTGKLQTDVDVTAEFLKSEEDYVKLFDWLNNRNAIKQDTLLNSFFKIKKERGKDKYPYRWNYVEDKEYRCNETRAAMLTGLEKSGIRTDVLTHEMEMALWHILYSVEDKTEIGKALKTFAKKNNLGEMFADVFCKMKPYKKEYRSYSEKAIRKFLPLMRMGKYWNKENIDDKTLSRIEKIITGEYDKTIKNRVREKAINLTDIDHFKGLPVWLACYIVYNRHSEAREIEKWDKPEDIDRYLNSFKQHSLRNPIVEQVITETLRTVRDIWKQEGDIDEIHVELGREMKNPADKRRLMTERIQQNENTNLRIKALLMEFLNPELGIENVRPHSPSQQDILRIYEENALDNLTKEDAEYEFVTKISKMAQPSKSDIIRYKCWLEQKYRSPYTGKMIPLSKLFTPAYEIEHIIPQSRYFDDSFSNKVICEAEVNKLKDRLLGYEFIKEHAGEIVQLSQGDTVKILSVEEYEKFVKDYYGSNRTKMKKLLMDDIPDGFIERQLNDSRYISKVIKTLLSNIVREKLENGEYEQEAVSRNLISCNGSITDRLKKDWGMNDVWNHIILPRFQRLNELTGTNLFTTQNHEGHEIPAMPFELQKGFNKKRIDHRHHAMDAIVIACATRDHVNLLNNEAAHSKHNANRYQLQRKLRRFAKITIDGKEREIAQEFLKPWPTFTSDALRTIQSIIVSFKQNLRVINKTTNSYLHYDEYGKKIYHKQTQGESWAIRKSMHKDTVFGEVNLRKKKSVSIKEAIVKPEAIVNKEFKEKVKELIAQGHDAKYIKKYVEDNKDIWSDINPSKIDVYYYTRDEKKQNGEPKERYFATRKPLDTSFDQKKIKESITDTGIQKILLAHLESKGNDPEQAFSPDGIDEMNRNIVTLNKDKFHQPIIKVRVYEKADKFCIGQKGNKKKKFVEAADGTNLFFAVYETADKKRVFATISLGLSIDCQKEGSQYWIKLLDERLRDKTPTEELQPYQKMDIPTDAHLLFILSPNDLVYVPYDGKPTDLTQVDRDRIYRAVSFNKKQCFCIKCNVATPIVNKVEYTTSNKMERATTGEMIKEVCVPIKVDRLGNITKIG

SEQ ID NO: 26 - protein, 1378 aa, Unknown
  Synthetic sequence or sequence of unknown origin
MKRIIGLDLGVSSCGWAYVKEAENEDEKSEILRIGVRVNPLTVDEQSNFEKGKSITTNAERQMKHSARINLQRYKLRREHLIDYLTKAGFINEGTLLCENGNRTTFETFRLRAKAANEEISLSELARVLLMINKKRGYKSNRKANGSEEGALIDGMAVAKYLYENDITPGQYAYELKKKGKKHLPDFYQSDIMDELDKIWNFQQPFYPNILTDEFRQVLAGKSKTNSTKLFLARYSIYTAQNKEKDKVLQALKWRSDALARKLDIEQLAYVICELNGLINNASDYLGKISDRSKELFFQNLTVGQYQMKMLDENPNVSLKNMVFYRQDYLDEFERIWETQAKFHPELTRERKKEIGNMIIFYQRPLKSKKSLISICELEGKQIEVEVEGKKKTITVGSKVCPKSSPLFQEFRIWQRLNDIELTDLSTRQKYGLNQEQKELLAKELEYKPKMTKQQMLKCLSLKPKDYDMNFKEVDGNTTQAMLFEAYRKIIEMSGHGEHDFSKMSASDISTLVESVFAALGFNTSVLHFDAQAADISQDSMYQLWHLLYSYESDNSAMGNKALICRIQELFHFDSDEYAKILAGISFKPDYGSLSAKAIKKILPFMKEGNDYSTACVYAGYNHSKRSLTKEELDNKPLKDHLDILSKNSLRNPVVEKILNQMINVVNSLIDTYGKPDEIRIELARELKKSAKEREAMTDAINAANRENEEYKKILETEFHIPHVSRNDILRYKLYLELKDNGFHTLYSDTYIPREKLFSRDFDIEHIIPQASLFDDSFSNKTLESRSINIEKSNSTAYDYVKGKYGEEGAKNYKTRVEDLFKNGTISKTKMTKLLMTADDIPTDFINRDLRDSQYIAKKAREILEEIVRVVVPTTGSITDRLREDWQLVDVMKELNWDKYDQLGLTETFEDKDGNTIRRIKDWTKRNDHRHHAMDALTIAFTKPSFIQYLNNLNARSDRSQSIYGIERKELYRDKHNKLRFNPPIPLDEFRTEAKRHLQNILVSIKAKNKVVTRNVNKTKCKEGFNTKVQLTPRGQLHNETIYGSQQRYAIHEEKVGASFTAEKIATVANKKQREALLARLQAYNNDAKKAFTGKNALDKNPVWLNEAHTTSVPLKVKCLTMETIYTIRKPINKDLKLDKVVDSRIKQILQQRLDKYKGDANKAFSNLDENPIWLNQEKGIAIKRVAIFGAVSAKAIRDKRDKYGHFLLDENNQHQPSDYINTNGNHHVAFYVDKEGNIHDYIVTFFEAVIRAINGFPIIDKEYNKSIGWNFLFTMKQNEYFVFPNTKTGFNPKEYDLTNESYYHLISPNLFRVQSISKKEYGNAVVRDFIFRHHLESSVNVSIKDITYKQMKSLSFVKDIVKVRLNHIGQIVSVGEY

SEQ ID NO: 27 - protein, 1097 aa, Unknown
  Synthetic sequence or sequence of unknown origin
MLPYGIGLDIGITSVGWATVALDENDRPYGIIGMGSRIFDAAEQPKTGESLAAPRRAARSARRRLRRHRHRNERIRALILRENLLSEGQLLHLYDGQLSDVYSLRVKALDERVSNEEFARILIHISQRRGFKSNRKGASSKEDSELLAAISANQVRMQQQGYRTVAEMYLKDPIYQEHRRNKGGNYIATVSRAMVEDEVHQIFTGQRACGNPAATKELEEAYVEILLSQRSFDDGPGDGSPYAGSQIERMIGKCQLEKEAGEPRAAKATYSFEYFSLLAAINNISIISNGQLSPLTKEQREMLIALAHKTSELNYARIRKELGLSEAQRFNTVSYGKMEIAEAEKKTKFEHLKAYHKMRREFERIAKGHFASITIEQRNAIGDVLSKYKTDAKIRPALREAGLTELDIDAAEALNFSKFGHISIKACKKIIPWLEQGMKYSEACNAAGYNFKGHDGQEKSHLLPPLDEESRNVITSPVALRAISQTIKVVNAIIRERGCSPTFINIELAREMSKDFYERIEIKKEQDGNRAKNERMMERIRTEYGKASPTGQDLVKFKLYEEQGGVCAYSLKQMSLAHLFEPDYAEVDHIVPYSISFDDGYKNKVLVLAKENRDKGNRLPLQYLQGKRREDFIAWVNSCVRDYKKRQRLLKESISEDDLRAFKERNLQDTKTASRFLLNYISDHLEFTQFATERKKHVTAVNGSVTAYLRKRWGITKIRENGDLHHAVDALVIACTTDGMIQQVSRFAQHRENQYSLAEDSRFIIDPETGEVIKEFPYPWPRFRQELEARLSSNPGLAVRDRGFLLYMAESIPVHPLFVSRMPRRKVTGAAHKETIKSGKAQKDGLLIVKKPLTDLKLDKEGEIANYYNPMSDRLLYEALKKRLTAFNGDGKKAFADPFYKPKSDGTQGPLVNKVKLCEPSTLNVSVIGGKGVAENDSMVRIDVFRVEGDGYYFVPVYVADTVKPELPNKACVANKPYTDWKEMRESDFLFSLYPNDLLKVTHKKALILTKAQKDSDLPDCKETKSEMLYFVSASISTASLACRTHDNSYRINSLGIKTLEALEKYTVDVLGEYHPVRRETRQTFTGRESSGHSGIS

SEQ ID NO: 28 - protein, 1369 aa, Unknown
  Synthetic sequence or sequence of unknown origin
MKKVLGLDLGSASIGWAVVNVAETKEEKAAILGCGSRVIPISAEEKDSFEKGKAISTNADRTLKRGMRRNLKRYEQRRDDLRRLFIDQGWISDGEPLSESGKNSTYETLYLRSKAAQDEISLKDLARVLLSINKKRGYKSSRKTDSGEDGQLIDGMSIAKELAKTGKTPAEFALESIKSGKSGKFDFYRSDLEKEFDRIWDCQQSSYPELLTDEFKSQLSKMNKTGATKAFFAKYKLTTAENKGKDRLRNSLEWRVSALKEPLDKEKMAYVICELRGAIQSSSGYLGDISDRSKELYFNQETVGQYLYRRIKEEKGFSTRNQVFYRQDYIDEFNTIWATQSAFHPELTDTLKRKIADRILFYQRPLKSQKGLISFCQFESRPIKVIIDGKEKTRTTGSKVAPKSSPLFQEFKVLQILNNVTIKDRRTFDSRGLGKEEKESLAATLRIREKMKGSDALKQLGLDPRRYDLNYKELEGNSTLFSLFSKYIEIVNLEKNSEYELQKMAYEKALEVIRDTFNKLGCHSDIFTFNSDLPKEEYEQQPIFKLWHLLYSYEGDKSVTGTASLVRHIMDISGLPEPQSKIIAGVSFNNNYASLSHKAIKKILPYMKEGHQYSDACAMAGYNHSNSLTKADIENKVLVDSLAQLPKGALRNPVVEKVINQMINVVNAAAEAYGKPDEIHIELARELKSSAKEREQATNGIQAGNKRNQEIEQILKSKFNIQQPSKNDILRYKLYDELKENGFKTLYSNKYIPESALFSKDIDIEHIIPQALMFDDSFSNKTLEYKDINIEKGRTTANDFVKAKYGDEGYAQYCQRIEYLYSKGVISNAKRKYLLMTEADIPTGFVDRDLRNSQYIAVKSREILEDYVKVVVPTTGSVTDRLRQEWQLIDVMKEINFAKFRTAGKTYTAIDSEGRKTEKIKDWTKRNDHRHHAMDAITIAFTKPQHIQILNNLRAKCDSNEEFRQLLDSQTTDTGKKRIFTPPMPLDQLRAEVKKHLDAALVSIKAKNKVVTRNVNKIKQAGGILRKTELTPRGALHKEQVYGKRRVYEVFYSPVNAKMTEEAIAMVASPKEKEALLARLAEFGGDAKKAFTGKNSLDKNPLYVGAEQIPAKVKCVRFKDIYSIRKELSPDLSIDKILDKGVKAKVEERIQEFGGDVKAAFANLDTNPICLDNDKTIPIKRVTIGENFDLTAIRNKHDKDGRLILDKSGNPIPSDYVNLRNNHHIALYIDADGNVQEAVVPMFEALNRINMQIPVVDKNYHSDLGWTFLFSMKINEMFVFPDKNTGFNPKDIDLLDPANSSLISPHLFRVQKLSSKDYYFRHHLETTIGDDNSLRDITWKRIKTIQLMADAVKVRINHIGKIVAVGEYD

SEQ ID NO: 29 - protein, 1225 aa, Unknown
  Synthetic sequence or sequence of unknown origin
MENVIKQRILGLDTGTNSLGWAVVDRLPLGGYELVDKGVQIFQEGVNIEKGTQEKSRAAERTSHRSLRKLYWRRKVRKIRLLTVLSNAGLCPSLTSQELRAWRMNGKYPLNNIAFMRWQLTDEQKGINPYAARCRCVEEELDMSSPDNRYLVGRAMYHIAQRRGFLSNRKDQTDDKDKESGAVKAGIKELTQKIHDAGCEYLCQYFYQLYQKGERIRSCYTDRKEHYEHEFDAICAKQHLDESLVQQLRKAIFEQRPLKSQRRGVAKCPFEPSKHCAPVSHPLFEEFRMWSFIRNIKMQTPEDAELRMLTNEEIDKVKHLWFRKSKANFPFEDIAKTLAGKGKYCYYKSAEDKPYRFNYYMDTSVAGCPVSAQLRDVFGEDLLKDRAQVDSIWLALDFFDDDLKLREWAIKHYNLADEQADAFVKIRLPQGYASLSLKAMENIVPLMRDHGMNYPNATLLAKLRDLTKDYPFEKDFDEDVEAYLKADIEEYLTIPTDKNGKPLMSREERKEALDVKWMQHYNLSAKEIKKLYHPSMIEEYRHVEHTTNGVYQLGSPRISALKNPMAMRSLFRMKAVVNQLLKDGTIDENTIIHIEFARELNDANRRAALRRYQAALRKEREDAVEAIKEFIPNPSDDDVLKYLLWKDQEGKCVYTGKSISLSALYNGTEFDIEHTVPRSMGGDTTRENLTICDAKFNREIKKNRLPSQLSEQAQELLQANIQTWKENCEALDKQLRKMKNATSGLSTKEAKDSVIAKRHLLEMQRDFWRNKYKAFTIEEKDVQGFTRRQGTDISVISRYGRLYLLSLFNRVDVVKGSMTAAFRKIWGIQTAYEKKNRENHVHHCIDAITIACMGKREYDELSAYYHADEENKYHSSDILMPKPWKTFTEDIKDIEQEILVAHYTSNPMGKQTKKKLRDSRGHIIRDANKQPRFAQGDTARGALHNDMIYGMIVNSQNVDDKHKVGNLCAVKRIILSSVASKDEEKMAASIVDPIIKKTVNDARAKYGSLSAAIEAEQENGDGSIWLNKEKNVKIKKVRCFQDFAINASPIRSLRDQSKKEYKRSHYSMTNGNFMSAIYEGTDAKGKKKRSFVIISLYEAAQAYGKHEPLVPTVSEEGYALIKTIRLGDLVLLYENSPEEIYTASQEELVKRMYEIIGMSDSKGLQIRLKHQQEARPNGELQQINGAFKNGDSAPIRMLLHTQFNALVQGQDFDISDTGKITFKSC

SEQ ID NO: 30 - protein, 1255 aa, Unknown
  Synthetic sequence or sequence of unknown origin
MKNILGLDLGTASVGWALIKVDDNNTPIDIQDIGVRIVPLAENEGDKFTKGQNITVNADRTRARGARRNIDRFQLRRQALTEELRSLDMLPDEKLIKLPVMELWQLRANAATQKVSLKELGRILYHLNQKRGYKHSITDQNDSKQRAYVKEINNRYRELKETGLTIGQFFAQKLSETAVSNDCKCFYVFRIKDQIYPRKAYEEEYDRIMKCQQEFYPEILTDNKINKIRNEIIYYQRDLRSCKHLVSICEFEKKCFYDANGEVKRNKKGEIVYDGPKVAPRTSPLFQVFKIWQSINNIRFRNRQNEYLYITKEQKQNIAEIMDKQDVLKLKDVQITLGITSKSGWYSDQAIKNGIKGNTTKHEILSSLSSLQQSQIDKITRFHLETVDTNMIDEETGEILVRIKGSYQKEPLYRLWHIIYSIKNDKERLNAIEKFLYEFDIIDKDVAEKLNNIDFVTPGYANLSSKAICKILPYLMDGIDYSDSCEYVGYNHSGSLTKVENENRELLDQIPAIKKNELRQPTVEKILNQTINVFNQINVELNKKGERIDEVRMELARALKQSKEEREETDRGIRKQQKLNEEYAEILKSDNIRPTRNRILKYRLWRESNETCFYCGQPVKFNEFLKFTEIEREHIIPKRLIFDDSFANQVCSCRKCNAEKGGRTALDYMRNKPNLQAYLDKVNQMFQDKKINSKKHSHLLASYDDYLVRKAEGKETKDDVRIWEEPIDRQLRLSQYISKKAQEILRTACRDVIATSGSITEFLRNTWGYGTILHDLNFNCFKDAGLTDTIIEEDTGRTREVIKNWTKRLDHRHHAIDALTVACTSRSIVQRINTLHASREDLRKEIKASRKDWQDNNLLLQWTKEKKPFDRHFVLEKIASILVSMKAGKKATVPGKRKIYKNGKPITVQTGLRIPRGQLHEQTIYGAITQFLKDKKGNVSQTKEYVVRYKMGVGSMGYVFNGKETCDVVYNKKKDCYEIKDGIEEAINYIVDKHIRDVVRKRMNEAFPEGESYRTGAEKALAEGRVYNGKERSQKALEQLKSLSENPLYTDKEHKIVVNSVRCFTGLHAVQPLRRNSKNEAISYVLTKNNHHVAIYTDENGDYKEMIYTFWQAVERSKYKLPLIIKDVNALWNEIRQREKDGEHFPDELIQSLPMPNWIFIESLQLNDMFVMDTDDETFENYIATNNYEEIGKSLYRVQSISTSDYFFRLHSDTTSITTQEAALSKRFIRIKSFKSYKNHNPHKVHISLLGKIIN

SEQ ID NO: 31 - protein, 1097 aa, Unknown
  Synthetic sequence or sequence of unknown origin
MEYTIGLDIGVASVGWAVLADDSQGEPCHIQDLGVRVFEAAEHPQTGASLAAPRREARGARRRIRRRRHRKERIKALLVKGGVITQEEMDRLFQNSGFAQDVYTLRAEGLDRCLTPEEWTRVLLHLSQRRGYRSNSTAEAAKDKETGVLKQALAGNQALMQEKGYRTVGEMFCRDEKFLFVGPDGNLWRKTHNTPGDYSFTITRDMIQQEAAALFAAQRNYSNPYADEALEEQYTKILLSQRHFDQGPGGNSPYGKGDLRGFCTFEPQERRAFKATYTFEYFKLLQDINHIRILSPSEPTRKLTQPEREQLISLAMESPSLDFARVRKALNLPPECSFNVVPYERDKEEAEKKRKFPQMQSYHTLRKALNTVEKNYITHLTYAQLDEIGTILSLYKADDKRQEGLEALGLSQQVIDALLPLSFSKAGNLSLTAMKKLIPFLEQGINYDEACREVYGDHRRMAGGQRYRYLTLNKELWDSGALDAITNPVVLRALSQTTKVLNAIIRRYGPPQRICIELAREMSNNFDQRNKIQKRNEENRAKNEKLMEQIQKLKNARPTGQDLVKFRLYQEQDGMCLYSGTQLDMERLFEPGYVDVDHIIPYSISFDDSNRNKVLVLAKENRQKGNRIPMEYLASDPERRERYITLVERYVRDYRKRQKLLKEKLTPEDCQGFKERNLVDTQYITRTIYNLLKDYLEFSPSASKTPVRAVNGAVTSHMRRMLGLTKHREDGDLHHAMDAAVVAVTTPGMIQKISRYAKRRELGQKVVGKYVDPETGELLSQADFDKKYAPEFPEPYDGFRQELLARLSPDPDTRIRELHLPHYDDGGEIRPVFVSQMPRRKVTGPAHAQTIRSGKKPGYALSKKALTELKLDKNGEIAGYYNPKDDVLLYNALKARLQAYNGDAQKAFAQPFHKPKKDGTDGPVVNKVKILEKSSLNVSACGGIADNGGMVRIDVYRVPEDGYYFVPVYTADVVKGVLPTKAVVALKGYDFWKPMEAQHFLFSLYPGDLVRVVAKKPINMKLKNKNAKGELELLRKEWLGYYVGANIFTASIAISTHDRKYVRDGIGVKTLLLLEKYQVDPLGSYQKVHLPEKRQDF

SEQ ID NO: 32 - protein, 1337 aa, Unknown
  Synthetic sequence or sequence of unknown origin
MVQDYYLGFDLGTGSLGWAVTDENYEILRAHGKALWGVRLFESAKTAEERRTFRTSRRRLNRRNWRIELLQGIFAEEINKIDDGFFLRMKESRYLPEDKKNKSGGVPQLPYALFVDKNYTDKDYHRQFPTIYHLRKWLMETKEIPDIRLVYLAFHHIMKHRGHFLLSGDIREIREFKTTFKQFIEVVKNEELDFTLEIEEEQYPNVEQILKNNQMTRTAKKTELIKSLKAASGCEKALLNLISGGTVKLSDIFGDKQLDESERPKLAFSDIGYDEYEGEIQSVLGEQYIIIEHAKAVYDWAVLADILDGQDSISAVKAALYEKHKADLVYLKKLVKENLPANIYKEIFTKTEEKISNYSAYIGMSKKNGKKQEIQGKRCSKDDFYKYLKKQVIERINDEKVTEYLKEEIDRGTFLPRQVIKDNSVIPHQIHLYELNQILSNLQEHIPLLKEQGEKIRKIFTFRIPYYVGPLNGVEKGKERTNWVKRKGEGKISPWNFEEIIDVEASAEQFIRRMTNKCTYLIHEDVLPKYSLKYSKFMVLNELNNLRLDGEPISVELKQKIYLEVFQRNRKVTQKKLKDYLIREGIAAKTVDITGVDGDFKSSLTAYHDFKEKLTGVKLEEEEKESVILNVTLFGDDKKLLKKRLKGLLPQLSDGQLTSLCNLPYRGWGRLSEKFLDSIVAPAPETGEVWTILRGLWESNDNLMQLLSEKYYFADAIEEENGKEGCKEISYQLIQELYVSPAVRRQIWQTLLIVKELCKVLGGPPKRVFVEMAREKTAKGRTQSRKSRLLELYKKCKTEENEWVEELNHTDESTLRGDKLYLYYVQKGRCMYSGERIELSELWDNQKYDIDHIYPQSKVMDDSLENRVLVKKVSNEEKSDRYPISENIRKKMQPFWKSLLDGNFITKEKYERLIRATEFEPEELAGFIARQLVETRQGTKAVASILKQVLPSAEIIYVKAPTVSQFRQDFKFVKVREMNDLHHAKDAYLNIVVGNVYFVKFTKNASWFIKEHPGRSYNLKRLFLADRVERNGEIAWVAGESGTIGKVKRTMEKNNILVTRRSYEVTGGLFDQQLMKKGKGQVPVKGSDERLRDLQKYGGYNKESGAYFVLVESEDKKGRKIRTIEYIPIRLKSKMKQDEELYCYLEEQRGLKNPKVLLNKIKTDTLFQVDGFYMWLSGRTENRLIFKGANQLLLPPKNVETLKKVLKFVARKKENKELKIFSADRIEKEMLLDLYDTFLSKLQKTVYGKRLGAQEKTLSDKRDTFRDLEIEEQCIVLSEILHMFQCQSGASNLKLIGGPENAGSLKINNDITKCRQINIINQSPTGIYEQVIDLQKV

SEQ ID NO: 33 - protein, 1348 aa, Unknown
  Synthetic sequence or sequence of unknown origin
MSIKSDYFLGLDIGTDSIGWAVTDPEYHILRRKGKALWGIRLFDAANTAAERRTFRTSRRRIQRRRQRIRLLQELFAEEMVKLDPGFFQRLSDSAFWQEDKQEQQIYSLFTCENYTDVDYYREYPTIYHLRSALIQEKKEFDLRLLYLALHHLMKHRGHFLFNGSINNVTSFHTTFQTFADCLYDEFDIELECDSEDRFAEILKDKHARKTGKCSELEIICHIEKSNKQLKELFKLITGMKASLSVVFGDDELAEIEHNKISFSESSYDEVRLALEDEIQERTGILDIFHAVYSWAILADILEGGEYEGNSYLSVAKVSTYKKHGDDLRLLRTLVREYCPDHYKSFFSVSGKDNYCAYAGTLKKNGKKQPIKRCSQEDFYKALKKLLNQMPTDQPEVKDIFIEIENGTFLPLQVSKDNGVIPYQVNKMELEKILQNAEEYLPFLKNIDEECGKTVSKKIIDLFEFRIPYYVGPLNTAKGENCWMVRKEAGRIYPWNFDEKVDRDQSAEKFIRRMTNQCTYLIHEDVVPKNSLLYSEFMVLNELNNVKIRSEKLPVELKQAIVLDLFKKQKQITGKKLLNYLNANGYDVKKEDLSGFDGNFKASLSSYLTLKKVFGEELDKYSVQQMAEDIILWITLYGDDQKMLRRVIRKHYEQQLSEEQILSLSKLKFQGWGRLSRRFLSEMEGVDCETGECMTVMQGLRNTQNNLMQLLSQQFTFMELIEEENGNYYVDEITYDNLVKDMVISPSVKRAVWQTVQIVEEIKGVMGCQPKKIFVEMARSDEEKKRTVSRKDRLLEAYDAIKDEARQWQEELQKYSDGDFKAIKLYLYYTQMGQCMYTGRKIDLSQLNDATVWDRDHIYPQSKTKDDSLDNLVLVDRSVNAKKSDGMLSPEIQQRMRATWKYLKEKKLISEKKYERLTRVSPLTDEELAGFINRQLVETRQSSKAVATLLKRVYDEAEIVYVKAEAVSNFRRDNLDYIKVRDLNDYHHAKDAYQNIIVGNVFHEKFTSNPLRWLKNNPNTKYSLNQMFNFDLEKNGVVIWKRGKDGSIKCVEETLKRNDILFTRYAFCNKGGFFHQMLTAAPEDKTKAKGLVPIKKGMETWKYGGYTSVTPSHFMLVASKDKKGKEIRTIETVPLYRWKEFKENPDALLQYCREFYGLKEPKVLIPCIKKNARLVVNGFPMHLKGSTGRQLILQGAVQLCLDNENIKYLKKVTKYLECNAQRRDKRTLLEVREVTGINKEENIQLYDVFVDKLSNTIYQYRPANPKDVLIKGKDKFVELNLAEQCVVLGEVLHLFQCKLIGANLILIGASQHTGMITNGKKISNCISIKLSSQSVTGIKERVIDLLNI

SEQ ID NO: 34 - protein, 1352 aa, Unknown
  Synthetic sequence or sequence of unknown origin
MYYMGLDLGTSSVGWALTDENYKIVRRKGKDIWGVRLFDEAKTASDRRTYRISRRRRAREVARIGVLKEYFSEAIEEADPGFYQRLEESKYHDADKRVTGRDALFHDADFTDRDYFAKYPTIAHLQKELICSREKQDVRLVYLAVLNLFKHRGHFLNGGLGEVAADAVSLYSDFRRISSDEFDIIYPEEYQVQEIEQVINNRAISKRERAERLAGCWKIAPSKDKRAYEIVKMLCGLSGRLANIFEKDMLAGDTGKLQLSFRDAKYEEKFDEIAECGSPQVMDLIASAKKLHDSWMLNEIMKGQTYLCFARVASYEKHRDDLRKLKEVLKKYAPEEYEYCFRKMENDNYSGYIGSVNCKKVKQRRNREASSEGFFKYLRKVLTDMPENDDVQYLLHELENESLLPRQLTADNGVIPNQVHTAELKAILKNAQEYLPFLKMQDETGLTVSERIVQLFSFQIPYYVGPLHIDGSREANKWVVRKEPGKVYPWNLSQKVDLQQTREEFILRMVRRCTYMAGENALPKGSLLYEKFMVLNELNVLRINGERISVQDKQNIYNLYFRKGKKVSRKKILSYFQSQGVIGTSEADVLTGVEDSFTCSLTSYGRFRDVVGDAIDTWDYQQMAEQIIFWGTVYSGDRNLLMELITEKYGSENKYADFCKTRSEGICLTKEQIKRIAGFKWQDWGRLSRQFLELEGCEKATGDVRTIVSALWETNHNLMELLSDEYTYRDALAEKAETKEKLLTEISHEDLEEYYFSAPVKRMIWQTMLILKEIRGVMGENPARIFVEMPRTDGERGQRTVSRKKKFEELYKQCRKEERSWQEEISRYSEGEFRSKKLYLYYLQKGRCMYSGEPIAMEDLFNDNLYDIDHIYPRHFVKDDSLDNNLVLVKKQINAHKSDSYPLEREIQDRQRVLWKALLEGGFLSKEKYGRLTRTWEFSDEELAGFINRQIVETGQATKAVAHLLEELLPGTEVVYVKAGNVSDFRHQFNMLKARSVNDFHHARDAYLNIVVGNTYHTRFTRNPLLFIQQNGKGRSYHMDKVFAFDVRRNGETAWTAGNQGSIVMVRKMMGRNTPLVTRRVYEVHGGIAKQTICSAREAKTEGYIPIKGKDERLADRTKYGGYGNVTGAYYFLVEHTRKKKRVRTLEVVPLYLKERLKGIEQLEAYCECQLELKQPKIVLSKIRFKTLICRNGMFLRISGRTGSYITVDNAVQLCLGGSWENYIRHLENFKGAGKEYDSRGIVTCQANMELYDILLRKHTQSIYRERPNSIAQKMTGGREKFESLGIAEQAGALIELLKGTQCANLSIDDKATGIKSSFMKVNNDVTRAETFLLIYESVTGIYTREMDLQTL

SEQ ID NO: 35 - protein, 1464 aa, Unknown
  Synthetic sequence or sequence of unknown origin
MKKYFLGLDVGTENIGYALTKDYEVMQVNGKRTMGVLSFDSANTAVDRRTYRATRRRLDRRRYRIALLQELFNDEIMANDKNFLRRLGDNDLYLVDRNVEGKYSLFNDTDFNDIVYYKQYPTIYHLREKLMMEGTDDIRLLYLAIHHIIKYRGHFLLAGEVSTNEVGGVKQLEELINKLNSKLDENNDENKNNDNTCFFDKFATTALSDVKDLICGTGDITKNMLNQITIGKKYISKRDKKNKLNELFGVSSSKTSKKIIDIVMGGKVNLTELFGKEYYEKEEVKGFTMAEEWESIEDLQLIKDNILHIDIIDTIKQIYDWVTLNEMLKGKQSLSSAMVEIYETHKQDLHDLKEFIKDYAPNDYERVFGEIKNEKGKIDNSICNYSCYIGGGRYNGDKIGANGRYGSTCTQEDFYKFIKKIIESVTVEEATALRDDLLERIANKDFMPKIVSKNNSTIPYQLNMMELDGILDKARQNPKFTFLNDVDNGWTIADKIKSLLSFRVPYYVGPVKEYEDNDNNKRYAWAVRKESGRITPWNFDDKIDKKQSNEIFIRRMTNRCTYLKLADTLPKNSILFSKFMCLNEINSMKINGDAISCKEKKAIFDNVFCKKNPTIKNIKKYLIENFGYEKGIVLSGIDNEIKSSMKTYIIYKNKLGNKVDADPNMIERIIFLSTIHEDSQMLEKSIREEFGDKLTEDEIKAIKGFKFNGWGSLSAEFLTGYKNNGIKLMFDGEMLDIIDIMYEYNLNLQQIIFNEKCNFSEALEAYDLEHNIVEDSNVSYNKDIADYPCSPSVKKCVWQSFKLVKDIVKQTKIVPDVVFIESCRENNDFKKNQRTSKRRDMIVANYDEARKIINELQRDKKAEFSIQELEGLSEDIDYCQKTLDNYSDSELKKENLYLYFMQLGKDMYTGKAIDLNQVLFGNMYDHDHIIPQAVIKDDSFTNLVLVAKKENAEKSRTYPLESQFRQTTLWKKLYKIGLLSNEKYSRLIRQTPITDEEQEKFINRQLVETSQTVVLLRDLLNRYFASKNVEVVLTKAGNVSMFRKEFDLTKSREVNDFHHAWDAYLNIIVGNILNKEFNHNWFIRQDNGKDKSYNFLRVLRKQATANNNEILNIIETTMNNIDFQMVKLPEEKKGNFYSEVLKTHENDKDSSLIPMCDNKIVGGKEIHPKCDTTKYGGYKTANTAYFILADSIDKKGAVQRNIVAISIFDDARIKNGKITYKEIFERIGLKDGKLANVEGMKVPIIKTGSLLDFGAYCLRLAGMTGNRLTFHNANQLFVSKDQNRYIKELGILVDKVVKESKKDTKEDKKEAMALEIIEESIRRKNNPDNKNSNIIVVNRKDNLKLYDFFVYKLSHNPYKDIPTYSSLLDILQRGKEDFEQKEIYAQVLLLFNIIKAFQCNAQKVDVSALSYVNKKGIATKGGAGQCSIAINSDITEIDKLILINQSMSGLKEQRIQLNLKKVDK

SEQ ID NO: 36 - protein, 1342 aa, Unknown
  Synthetic sequence or sequence of unknown origin
MYYMGLDLGTSSVGWALTDEDYHIVRRKGKDIWGVRLFDEARTAVDRRTNRISRRRRAREIARIGMLKEFFCEAIGEVDPGFYQRLEESKYHDMDKRIEGKDAVFHDVGFSDKDYYSKYPTIAHLQKELICSEEKHDVRLVYLAILNLFKHRGHFLNAGLGDVGADILTLYSEFQRIAADEFGISFPIQYQKQNIEKLMDNRTISKKERAEQLAVLWKVIPAKNKQEYEIIKMLCGLSGKMANVFQKDMLAGETGKIQVSFRDAKFEEKFGELSECGYSQMTDLIEAAKRLHDCWLLNEIMKGQPYLCFARVASYEKHKDDLKILKKVLQKHAPEEYEYCFRTMENDNYSGYVGSVNCKKQKVRRNRKASPEEFFKYLRKVLKSIPGDEDTQYLLHELENESLLPKQLTADNGVIPNQVHTAELKAILGNAQKYLPFLQQKDETGLTVSEKIVQLFSFQIPYYVGPLYINGGDETNKWVVRREDGKVYPWNLKQKVDLQRTREEFIMRMVRHCTYLTGESALPKGSLLYEKYMVLNELNVLRINGERISVEDKQNIYNLFFVKGKKVSRKKILSYFQSQGVIGEQEEDLLTGMEESSICALTSYGRFRNVVGDAIDSWEYQRMAEEIIFWGTVYSGDRKLMTELITEKYGPESNMAYLTIEQIKRISGFKWQDWGRLSRQFLELEGCEKATGEVRTVISALWETSSNLMELLSDRYTYLDRLAQKTEKADKLLEEVRYDDLEGYCFSAPVKRMVWQTLLIMKEVTQVMGENPGRIFVEMPRADGEKGRRTASRKRKFEELYKQCKKDGHDWQKEISQRSEGEFRSKKLYLYYLQKGRCMYTGEPISLEDLFNDNLYDIDHIYPRHFVKDDSLDNNLVLVRKQINAHKSDSFPLEKEIQRKQHTLWKSLLDAGFLSKEKYGRLTRTWEFSDEELAGFINRQIVETGQATKAVAHLLEELLPDTEVVYVKAGNVSEFRHRFDMLKSRSVNDFHHAKDAYLNIVVGNTYYSKFTRNPLWFIQKNGKSRPYHMDKIFEYDVQRDGKCAWTAGNQGSIVLVKKMMGRNTPLVTRRVYEMHGGIAEQTIYSAREAKPGSYIPVKSKDERLADVMKYGGYSSVTGTYYFLVEHIRKKKKVRTLEAVPLYLKDKLNGIEQLTIYCECELGLEEPRIILPRIRFKTLIKRNGMLLRISGRTGKRIMVDNAVQLCLGIHWENYIRHLENYLVSGKESDNRGIVTGKKNMELYDILLKKHTQTVYRNRPNSVAQKMADAKDRFVGLGMTEQAGALIELLKATQCSNLTIDDKATGIKASPMKINNEITSAESFCLIYESVTGIYTKEMDLQAL

SEQ ID NO: 37 - protein, 1092 aa, Unknown
  Synthetic sequence or sequence of unknown origin
MAYGIGLDIGIASVGYAVVALDTDENPWGIIRMGSRIFDAAENPKDGASLALPRREARSTRRRLRRHRHRIERIKNLFLRSGLLTGTDLDCLYQGQLEDIYALRVKALDEPVGKKELARILLHLAQRRGFKSNRKAESKEKEAGLLKAAVSENEKRMAENHYRTAGEMFLKDPAFSQYKRNKGGVYLTTVQRSMIAEEADIILQRQSELGNKIITRDFKEEYFSILLSQRQFDEGPGGNSPYGGNQIEKMIGICTFEDGTNGFPAEPRAAKACYSFEYFNLLQKVNHIRLLYKNESRFLDDGQRKKVIELAKTKADLNYSHIRKELGLGEEIKFNMLVYNADDIEKKTKFNFMPAYHQVKKALNAVAKGHIESYSTELLDEIGRILSTYKGDEKRTEELIKAGIAIPDVDELLKIGGLSKFGHLSLKALRKIIPFLEQGMSYDKACEAAGYNFRAHNKEKSMYLPAKAEELQDITNPVVRRAVAQTIKVVNAIIREQGESPIYVNIELAREMAKDFKERAKLTKENHENQAENERLLDRIRKEFGKSNPTGMDLVKLKLWKEQDGISPYSRKTIEVTRLFEPGYVDVDHIVPYSISFDDTYKNKVLVMSSENREKGNKLPIQYLAAKFGKDAVEAFKVWVVNSVKNYPKRQKLLKEKITEEDITGFKERNLQDTKYMARVLYNFINDRLLFAESEIGKKKRVRAVNGAITSYLRKRWGINKVRENGDKHHAVDALVIACTTDKMIQEISGYARGQELEYEPMDKESLLVDKSTGLILKRFPYPWEDFRKELMARMSDQPAEALQKLRLLYYQDKDITAIKPIFVSRMPRHKVTGAAHKATVKGARHLDEGIALYKTDLVNLKLDKNTGEIVDYYNPESDRLLYNALKTQLQKYNGDGKKAFAEPFYKPKADGTPGPLVKKVKCFEKTTLNVLVEDGTGAADNDSMVRVDVFKVEGDGYYLVPIYVADTLKETLPNKAIVAHKQYSQWKEMKEEDFLFSLYPNDLIRVQNKKDMVFTKSQKESNLPENYIAKDIIAYYKQTDISAGAIKIISNDDSYSLRGLGVKTLQRIEKYQVDVLGSYYKVKTEKRQLFH

SEQ ID NO: 38 - protein, 1212 aa, Unknown
  Synthetic sequence or sequence of unknown origin
MSKILGLDVGIGSLGWAIIDEDARRIVDLGVRIFESGEEGATDAAGRASQIRRSYRSTKRLNKRRKHRNIRLKSFIEELNIISVEDINCSYKTKGFNPDTWRYRSEGISRKLSPIELASVLINLSNYRGYRDFYEDDEEDSGKLAVAKNRINTIYEEKKDQYRTIGQMIYNEPCFRDERNGKLVIRNRAIRGTDGKKETNYVYLINRSTLIDELKVLLSCQREFGYEQLTDDAIDKICSIIFVQRDFEDGPGPNKAESPERRESMMKSLKGHQSYSGFDELVGNCSFYPTEGRGHKNSQLYDMYVVINTLSQLRFYCDNKEVNCPESVVMEIRLQLFENGGSLSKKHLEKICKDHKIEVSFPGELSKKKVIIKAPYIKILTDDHLFDVDFMQQFKEENYYDDCSLSSKIGLAIAKYATPRRRKDEIKNNVTDEEYNRLGYADGLKTIKSLGVSNVSFKYMKEAISAYLNGIKYGDFQADFIKNNIENDEKKFLSNDGKLLPINDPDMVRNPVVYRTINETRKIVNAVMGLYKDIKTINIEIARDIGKSFEQRKETAKYQKENENSNEELRAELLRKLYSEGYSVMLSDRLLDKYKLWKDQKHMCMYSGKEIQFKEIVAAVNVQIEHIVPQSIILDETLNNKVLVLTEENQKKNNRLPLEYMDSSQAKGFKNRVNNLYRTNNINRIKYEYLMLESLTDDVISGFVDRNINDTRTISKYVSNYLRLSFNGDVTVNVIKGSVTSRFRRRWLGTRSKRYDGVPSVYGLEQKTRKLHYYHHAIDAAVVANLTRPYIEIAQDYLRIESIRKDAEYHAKKGNSKTSLVLYDELEKEKAKSLDKIHHFYGFNREYTRSLLDSGFVPSICKDFRSEIEIRVPLEITFDAFGYTQMEKSYRSLRNNMDAIKSNLTDADIEAGTVIVPNMLEDINSDLPIVCPEAVCIKPNAQIVFSDKDFDPNADSDVIRKQFDKFTKNLSPRDVMDYIEDIRMVTEDEYATRVKKYYSSDPTFAERIKLPYVSFKISKKFRGNMVASDNPIALKKTGFNTYIELENDIKNNLKSPYYVRFNKGINESGNFTIYDARSYYCIEIFIDDKGTYQIRGIRYVDVVHDSKRGKLRLLKPLPLGYKHVMYLFKNEYIISYDKKGNIKNNGFGAYRGVENINRNTGKIRLFSNMNLSGRDNSINLAGACSKIEISILGHIMGMKKCGDQSLFITEKS

SEQ ID NO: 39 - protein, 1087 aa, Unknown
  Synthetic sequence or sequence of unknown origin
MKYIIGLDMGIASVGYATLLLDDKEQPCRILKMNSRIFEAAEHPKDGSSLAAPRRINRGMRRRLRRRRFRKEQIRDLIAEKGIMTTEEIDEIYNSGKELSDIYEIRAEALDRILSKEEFVRLMIHLSQRRGFKSNRKVDASDSKSESGKLLIAVKNNRELLSEKGYRTIGEMLYKDERFAANKRNKADDYSNTFSRAEYEDEINQIFEAQLALGNPYATDDFRKKYLDIYLSQRAFDDGPGGKSPYAGNQIEKMLGHCTFEENELRAVKASYSFEYFNLLSKVNAIKIVGEGGKRSLTDAERKSVIALAFAKNSVTYASLRRELKLPDGKFFNISYGKGDKSAEEVEKKTKFAYLTAFHTFKKAYGQAYVGWSTEKKNALAYALTVYKNDNKIIAYLTDHNFEKAEIEIALTLPSFTKTGNLSVKALDKLIPYLEQGMLYNEACSAAGYNFKADDASKRMFLPANAKDAPELEELRNPVVRRAVSQTIKVINAVIRECGESPTFVNIEIARELAKDFKDRKQIEREQKENQEKNEKLMERLRNEFHILKPTGQDLIKLKLWEEQDGRCPYSQKPISIEKLFDVGYTDIDHIIPYSICFDDTYNNKVLVLSAENRMKGNRLPMQYLGGKRQDDFRLWVNSAHLRKRKKDNLLRESYTEEDKSGWKKRNLQDTQYMASFMLNYLKKYLALQPSDQGRKNQIISVNGRATDYLRKRWGVQKIRENGDTHHAVDAVIIACVTQGMIKRISEYAKYKETAFQHPETKEYFDVDKKTGEVINRFPLPYPDFRKELDIRCSDDPIRLLRLYPLVQYSSGEEVKPMFVSRMPNHKVKGAAHMETIRGHFKEDGKDYSVAKVPLTSLKLKNGEIEGYFNPGSDMLLYNALKARLAQFGGDGKKAFSEPFYKPKADGSQGPLVKKVKIVNKSTLSVPVHGGTAVADNGSMVRVDVFYVENEGYYLVPVYVSDTVKRELPNRAIVAHKAYEDWKEMDENNFVFSLYPNDLIKLTFAKEMSFSLTNKGSSLPPEMKCKEIFAYYKGTNIASGTIGVINHDNTYGIGSLGIKRLPHIEKYQVDVLGNITKVGKEKRMRFR

SEQ ID NO: 40 - DNA, 3183 bp, Unknown
  Synthetic sequence or sequence of unknown origin
atgaaactaaacagatggcgattaggattagatttaggaacaaattcaataggctggagtgttttttctctagataaagataatagcgttcttgaacttgttgatttaggagttcgaatcttttctgatggaagggatccaaaaactaaagagccattagcggttgccagaagaactgctcgttctcaaagaaaacttatatatcgacgtaaacttagaagaaagcaaacttttagactattacaggcacaaggactttttcctgcaactaaagaagaatgcttagaattaaaatccttgaatccatatgaattgagaataaaagcgttggattcaaaacttgaaccttatgaactggggcgagctttatttaatctttcagttcgacgaggatttaaaagtaatcgaaaagatggtagccgcgaagaaactgcagagaagaaaccttctgatgaaattaaaacacaggcagatatgcagtcccatctggaaaaagcaataaaggaaaataattgtcgtacaataacagagttcttatacaaaaatcaagatgaaaatggaggattaagatttgctccaaatcgaatgacttattatccaacaagaaaaatgtatgaagaagaattcgaacttatttgtactgaacaaaaaaagtattatccagatgtagattgggatgtaatttataaatcaattttttatcaacgcccgctaaaacctcaagctagaggatattgtgtttatgaaacagataaagaaagaacatttaaagcaatgccttgttctcaaaaacttagaatactacaggacattggaaatcttgcttattatgattctgctacaaaaacgaaaatagaattaaatgataatcaagatagtattctttatgaattattaaactcaaaagataaagtaacttttgatcaaatgagaaaagctttaaaactttctgattcaaactcttttaatcttgaagaaaatagagattttttaattggaaacccaactgcggtaaagatgcgtagtaagaatcgttttggaaagctttgggatgatatttcgcttgaggagcaggatttaattattgaaacgattattacagcagatgaagatgaagaagtttataaggttctggaaaaatatgatttaacacaggaacaaaaagattttattgttaagaatacaatattacaatctggaacaacaatgttatgtaaagaagtttcagaaaaacttgtaaaacgaatggaagaaatagctgatttgaaatatcatgatgcagttgattcattaggatataagtttgcagatcagacagtagagaaatatgatttgcttccttactatggaaaagtcttaactggttctacaatgggtgttaattattctgaaccggaatcaaatccagaaaagagatatggaaaaataagtaatccaacagttcatgttgcgcttaatcaaactagagttgttgtgaatgctttgattaaggaatatggaaaaccgactcagatagcaatagaattgagccgtgatttgaaaaatagtgttgctgaaaaagctgaaatagcaagaaaacaaaatcaacgtgcaaaagaaaatataattattaataacgatatttctgaactttataataaagctttccctgggaaaacattttatccaaatagaaatgaccgtttgaaatatcgtctgtggaaagaattaggattaggttcaaaatgtatttattgtggtaaaggtatttctgcttctgaattatttacaaaagaaattgaaatagagcatatattaccatttagtagaactttgcttgatgcagaatcaaatcttacagttgcacattcaagttgtaatgcatttaaggcagaacgttctccttatgaagcttttggttcaaatcccaaaggttataattggacagaaattgttcagcgtgcaaatggattaactaatacctcaaagaaaaataagttttctccaacagcaatggattcttttgaaaaggattcaagttttatagctcgtcaactttcagataatcaatacattgcaagatctgctttacgatatttgaagtgtcttgtagaaaatccaagtgatgtatgggctacaaatggaagcatgacaaaattattgcgtgataaatgggagatggattctattttgtgtagaaagtttacagaaaaagaagtaacacagcttggattaaaaccagaacaaattggcaactacaaaaaaaatagatatgaccataggcatcatgccgtagatgcagttgttattggacttacagatagaagcctggtacagaaacttgcaactaaaaactctcataaaaataatagaattgaagtacctgagtttccaattcttaaaacagacatgattgaaaaggtaaaaaatatagttgtcagttttaaaccggatcacggagcagaaggtaagctttctaaagaaacattgttgggaaaaattaagattcatgggaaagaaacctttgtttgcagggagaatattatttctcttacagaaaaaaatcttgatgacattgttgacgaaaaaattaagaagctggtaaaagattttgttgcaaaacataaaggtgaaaaaattgaaaacatacttacccaattctcacaagagactggaattaagaaagttagatgtgtgaatagagttcaaataccaatagaaataacatcaggaattgtaccaaggtaccttgctccggaagattattttgcggcaattatttgggaattaccaggtgaaaagaaaacttataaagcgcagtatattcgtcgtaatgaagtagaaaaagattccaagggtatgaatatagtaagaaagcaagttatagaaaaaggaaagcctcatcctgctgcaaaatatatctgcttaattcataaagatgattatcttgagtttacagatggtggaaaaatgcatttgtgtcgagtagcgggatattcagctacaagaaataacctcgatatacgccctatttattctgtttcctattgtgcggattggattttttcaacaaatgaaaatatgttagaaaattattggaaaccatcaccaggtcagaattgggtttctgtaaatgttctcttttcgcaattacaggcacatttagttacagtaaacccaataggaagagtatttagaaaataa

SEQ ID NO: 41 - DNA, 3276 bp, Unknown
  Synthetic sequence or sequence of unknown origin
atgagttatgcaattggattagactgtggcatcgcttccgtgggctatgcggtaatggatttagatgaaaaaggaaatccaaaacgcatcatacgtctcggctcgcgtatcttcccttccgcggaacatccaaaagatggtagttctcttgctttgccacgaagggaagcaagaagtactcgtcgaaggcttcgtcgacataaacatcgtttggaaagaatccgatatatgattgttgatgaaggaatcctttctcaagaacaacttgacgttctctattctgagccggtctcagatatttacatgcttcgagttgacgcactcgacagacctcttacaaatgaggagtttgccagggtgttgatccaccttgcccagcggagaggctttaagtcaaatcgaaaggtcgacaaggaggataaagatgatggaaagctcttaacggcagtaagcggaaatactctccttatgaaagaaaagggttatcgtacagttggagagatgtttgcaaaagacgaaaaattctcatcacaaaagcgaaacaaggcggagaactacactaacacagtttccagagaaatggttgaagatgaggttcacaaactatttgcagcccaaagagagtttgattgtccctttgcaaatgaaacagttgagaaccggtatgtcaatattctgttttcgcaacgttcttttgaagaagggcctggaggggacagtccttatggtggcaaccaaattgaaaagatgattggtcgttgcacgttcttcccagaagaacaacgtgccgcgaaagcaacttattcgttccaatatttcagccttctgcaagccgtgaaccacattcgtattgtttcggatggttctataagaacccttcgttcagatgaaagaaaaaacgtacttgaggcagcgtttcaaacggatggtctgacgttcaaaagaattcgtgcggttttggggctttcggagaatgaccgttttcggaatgtctattatcggtctgatgacaaagaagaatgggaatctaaaaccaaattccagtatttgcacgcatatcatgagatgcgaaaaaggtttgacaaactgaagaaagggcatatcagcatcgttagccgtacagatctggatgaaattggatatgccttaactgtgtttaagacagacgacaaaattatctcatatcttaaagagcatacatctctcgataagtcagagatagatgctgttctgatgatgccttctttttccaaatttggccatatttctgtaaaagcatgcaaagcgattattcctagtttggagcaggggatgacctacgataaagcttgtgaaaatgcaggtatcaaattccaaggacatgatagtgacggaaagacaagatatcttccggccaacccaaatgatgctcctgaactagaagatatcaacaaccctgtagtacgaagagcggtatcacaaacaatcaaggtgatcaatgccatcattcgagaacagggtgaaagtcccgcatatctgaacttggaactggctagagaaatgtcgaagagttttcaggatcggcaagagatcaaaaagagtcatgaccaaaacaatgcaagaaacgaaaaaatcaaacaggaaatcgcagataattttggaaaggtcaatccttctggacaagatatcttaaaactgaaactgtatcacgaacaacaaggggtctccctatattcacaaaaggtgatagcgtatgatcgtctttttgagccagggtatgtcgatatcgatcatatcgtgccttatagcatttgctttgacgattctttccgaaacaaggtgttggttttttcaaatgagaacagagaaaaaggaaatcgtgttccgttagattatcttcgtggagaagaagcgaataattttgttgtgtacgttaaagccaatgtgaaagattataaaaagaaacagcggttattgaggtcgcgcccgacagaggaagatatcaaagaattcaaggaaaggaatttgaacgacaccaaatatttgagccgttttcttttaaactatatccaagatcatcttcagttttcagaaagtggttcagataaaaccaagcgagtcacatccgttaacggttctgtaactgcatatatgcgaaagcgctggggtatcaataagattcgtgaaaatggcgatttgcaccatgctgtagatgctgctgttattgcttgtgtaaccgatggaatgatcaatcgcatttccagatggagcaaataccatgaaacagaatatgaagaattcgagggtgagagttatgctgttgacccaagaactggtgaagtgttagatcgattcccgctcccatatccggagtttcggaaagagctggattgccgcttgtttgacaatgagaaacatatgcatgaagctctcactcggctgagtaattatcgtgacgttgaattgtcgacgattcatccttgttttgtttccagaatgccgaatcacaaagtgaccggaccggcgcatcaagatacagttcgtagtcctcgccattatgaggaggatgggattgttattgctaaaacagcgttacaaaacttaaaactgaaggatggcgaaatcgaaggatactacaagccagaaagtgaccgtttgctttatgatgctctgaaagcacgtttagtagagtttggtggagacgcaaaaaaagcgtttaaggacgacttctataaacccaagtcagacggaacacgtggcccattggttcgcaaagtgaaaacgttcaaaaaatcttcgttgaatgtctctgttaacaacggaaaaggcgttgcagacaatgggtcaatggtgcgcatcgatgtgttttttgtggaaggcgatgggtactattttattccaatatatgttgctgacacactaaaagaagagttgactaataaagcggttgtagcacacaaatcatacgatgaatggcgggaaatgaaagaagaagactttcaattctctttatatcccaatgatttgattcttgtaaaaaaagcttccggtgctattcctctaacaataaacttgaaagacagtacacttcctccaaaaatcgaaaagagcgaggtcttcctatactatcgcaaatcaggcatagctggagcaacaattgtttgtgataaccatgacggctcatactatgtgaccaatttaggaatcaaaacattagcgtcaattgagaagtaccaggttgatgttttggggaattattataaggttggaaaagagagaagacagagttttcggtaa

SEQ ID NO: 42 - DNA, 3267 bp, Unknown
  Synthetic sequence or sequence of unknown origin
atgatcccctatgcgattggtctggatgtcggaataagctctgtgggctgggcggctgttgcgctggatgaggcggagagaccctgtgcgatccttgatatgggctcgcggatctttgatgcggcggagcagcccaagacaggcgcgtcgcttgccgcaccgagacgggaggcaagaagcgcccgacgccgcctgcgcagacatcggcaccggaacgagcggatccgccgtttgatcgtgaatgccgggctcttgacggaagaggaactgacgaccctgtttgacggtacgctggaggacgtctattctctccgtgtccgtgcgctggacgagcccgtcagcaagccggactttgcccgtattctgctgcatctggcacagcgccgcggctttcgctccaaccgaaaaagcgcctctgacaaggaggatggaaggatccttgccgccgtcgctgaaaacacaatgcggatggcggagaaaggataccgcacggcgggggaaatgctgctctgcgatcctgcctttgcccagcaaaagcgcaacaagggcggtgactataccacgaccatttcgcgcgatatggttgccgaggaagtcaaaacgctgtttgcctcgcagagaaacgccggaagtgctttcgccgcgccggaactggaagaggcgtatctggagatcctgctcagccagcgctcttttgacgaggggccggggggcgacagcccttacggcggcagtcagatagagcggatggtggggaagtgcaccttcttccccgaagagccgcgagcggcacgcgcttgctattcttttgaacgtttcagcctgctccagaaggtcaaccatatccgcctccagaaagatggagaaagcatttgcctcacggaggggcagcgccgtaagctgatcgagttggcgcacaagagcgcgagccttgatttcgcgcgaatccgcaagacgctggagctcccggcggagtatcgcttcaacgtggtctcctaccgcacggagaacacgccggaagaagcggagaaaaaagaaaagttcaactatctcaagggctaccacagcatgcgcagtgccatcgagaaggtcggcaagggccggtttgctctgctgaccgcggagcagcgtgacgcgatcggcacgatcctgacgctgtacaaggcggacgagcgggtacggagtgagctcatggccgccgggatcgaagcctgcgacgcggaggccctgctgtcgatcggcggtttctccaagaccggtcacatctccctgaaagcgtgccgtctgctgattcctttcctggagcaggggatgaactacaacgaggcctgtgccgcggcgggtctggattttcatgcgcatgaggacgacggcagaagcgaatatctccatcccgccgaggatgactttgcggatatcacaagtccggttgtgcgccgcgccatatcacagacagtaaaggtcctcaacgccattatccggcgttatggtccgagccctgtttttgtcaatatcgaactggcgcgcgagatggcgaaagatttcagcgagcgcaaaaaactggagaaagagaacaaggagaaccgggcgaagaacgagcgcatcctggaacgcatccgaacggaatacggaaaaaacaacgccaccggtctggacctggtcaagctgaagctctatgaggagcaggggggagtctgtgcatattcccagaagcagatgtctctgcagcgcctgttcgagccgaattacgccgaggtcgatcacatcatcccgtacagcctgtcctttgacgattcctaccgcaacaaggtcctcgtattgacggaggagaaccggaacaaggggaatcgcctcccgctgcagtatctgagcggcaagcgtcgggaggacttcgtcgtctgggtcaacagcagcgtgcgcgactatcgcaagcggcaaaagctgctgaaagagcgcctcacggaggaggacgaaaagcagttcagggagcggaacctgcaagacaccaagacgatgtcgcgcttcctcctgaactatatccaggacaatcttctctttgctccctcggcctgcgggcggaaaaagcgggtgacggcggtcaacggggctgtgacctccttcatgcgcaagcgctgggggatcaccaaggtccgcgaggacggcgacctgcaccatgcggtggacgcgctggtgatcgcctgcacgacggacgccatgatccagcaggtctcgcgctatgcggccttccgcgagtgccgctatatgcagacggagacgggaagcctggccgttgacgagcagacgggcgaggtgctgcgggagtttccgtatccctggccgcagttccgtcgggagctggggctgcgcctgagcaacgaccccgtccgtctgctccgggatatgcggattcccttctacgacgagcatgacatcgtgccgaagcccctcttcgtctcccgcatgccgcgccgcaaggtgacgggagctgcacacaaggacacggtcaagagcccgagggcgctggacgagggttcggtcgtggtcaagcggcccttgacagacttgaagctcaaagacggggaaatcgagaactattaccggccggagagcgaccgcctgctgtacgcggcgctgaaggcacggctcgcggccttcggcggcgacggcgcgaaagcctttgccgagcccttttacaagccgcggcacgacgggacgcagggaccgcccgtgaagaaggtaaagctctgcgagccgagcacgctgaatgtggcggtccacggaggaaaaggcgttgcggacaacgactccatggtgaggatcgacgtgttccatgtggagggggacgggtactacttcgtgccgatctatgtggcggacaccctgaagccggagctgccggacaaagcctgcgtggcgttcaagccgtacgaggagtggaagccgatgcgggtggaggattttctcttctccgtgtatccgaacgatctgctgcgcgtgacgcataaaagaaccatgaaactctccaagaccaacaaagaaagcagcttgcaggattccgttgagggaaaaagcatgttcctgtactacatcagcgcggggatttccagcgcgacgatttcctgccggaatcacgacaatacctatgagatcagaagcctcggcatcaagaccttggaaaagctggaaaagtacacggtggacgttctgggagagtaccacaaagtggagaaagaaccgaggattccctttacacagaaaaggagctga

SEQ ID NO: 43 - DNA, 3153 bp, Unknown
  Synthetic sequence or sequence of unknown origin
atgaaaagaaagtgcggaattggtttagatattggaattggttctattggttatgttgttatttcaaggactaataattttgacgcccgtatagaagatttgggagtaagagtatttgattcaggagaaaatatcagaaagaaagcaagcaatgcgcaagagagacgcggatatagaagcgtacgccgtttgcttaggagaagaaagcatcgtaaagaacgtgtaaaaaaattctttttgaaaataaagcttatgaatgaaattcaattaaaagcatgggaagaaagaaatggtgatcaaaatgtacttcaaacaagaattaagggcttaagtgaaaaacttaagcctgaagaaattttggactgcattatacatatttgtaatcaccgtggttatcgtgaattttatgatgaagattcctgcaatgaaaatataaataaagatgatctgaaaaaaatagaaggaggattagcaagttttgatgagttatatcagcatggaaattataaatctgttgctgagatgattttaaaagatcccgtttttaaaacagaaacaacttttgtagattatagaaatcataaaaataataaccgttatgttttaattaaaagagaatttgtaaaaaaagaattggaaaatattttacaccaacaaagtaaatattatccgcagcttacagaaaataatattaaaattatttgcgataatatggtttttattcaaagagattttgaaactggcccaggtaatgaaaatgataaaaccagaagatttatgggttttattgatagtattggtaagtgcatgtattacaaagatgagaaaagagcttatagaagtactgttattgccgatatttatgctttggtaaattgtttgtcgcagttttcttttataaatactgaaacaggagaaattttactgcctgataatgcagcaacaaagattattgatacagcactgttaaatgcagcaataacagaaaatgatattaaaaatattttaaaaccgtatcatttggaaatgcgtaaaccggaaaaattacaggttaaagtaccagatactgttagaactttaaaaattttaaaatcagttttaacaaatgctggatataagtatgaagaattaataaaagaaaaacaatttgatgttaataatccttcaaaattacatcaattgtgtttattattgtctgaaaatattactccagcaagaagaacaagagtattaaaagctaagggatggaacgaaaaattacaaaaagaagttatacgtaaaaaatttggcggaacagcaagtgtatgtgaaaaatatatgattgatgccatagaggcatttaaacgaggagaaacttatggtaattttcaggcacgtatgctgaaagaacgagaggaaactttgtcagagtctaaaaaacaaaaatttctttcaccgtttgataaaaaaattgatgaagaattaattaaaaatactgttgtttttaaatctgtcaacgaaactcgcaaaattttaaatgaacttataagaagatatggttctcctgaatatattaatattgaagttgctgatgatttaggacgcagctttaaagaacgttctaaaattataaaacgtaataatgataaacaaaaagacagagaaaaaattaaaaataaattaattgaattaggattacgtaaagagggcgaagtaaaaccttttgatattgaaagataccgtttgtgggaagaacaagaaggcagagatttatatacaggcgaagcaattcctttagaaaaaatattaagtggtatttatgatgtagaccatattgtacctttttctcttattttagatgatagtttacagaataaggcattagttaatcttggtgtaaacaggcaacaaaaaggacagcaggttcctttagcttttttaaatgttgtagataaaatagattatttaaagcgcgttaatgttttgtataaaaataagaaaataagtactaaaaaatacaaatacttaatgttgcctaatttgtatgctaatagtgaattgcttactgaatggaaatcaagaaatattaatgatacaagatatataacaagatttttggttaattatttatcggcaaatttattatttgatagcacaaaaacaaaaaatgtttttggcgttaaaggaataataacatcaaaaatgagaaagttatggcttaataaaaagacatggggtgatgagcagaaaaacagagataataatttacatcatgccgcagatgctttggtaattgccaatttaactcctgcatatcttgaaattgccagcgataaaattaaacttgatagaatttacaaagactatcataagaagataagcaatgaatatttaacttatttaagtaaatctgtaaataaaatggttaaatattatggttttaataaagaatatgctgaaaaacttttaggaacgccgaatagccgtatacctgctatgataagaaatatagcagatgaagctgatatacgtctgtgggataacagcatagagtattataaagatgtaagtgaagaacagttttataaaaatgtaaaggcgttttataatgatgatactgcttttgcaaaaagtgtaaaacctgtacttgtttcatataagcaaaacagaaaatatcaaggtaaatttaccaaagataatccactgaagaaaaatgaaataaaaggagcttttattgaaaaaattgatagtttaggtaatgtaaatattttagatgctaaagagtattattgcgctgaattatataaaaacttgcaaggtcaaactattttacgtggaatacgatatgttgatttgcaaaagaaaaataaaaaattatatattatatcttcatatccagaagattataaaaaacatattatgtatttatttgctaatgactatattaaagttttcgataatgacggaaaaattaaatttaatggttattacaaaagtataaaaaatgtaaacagaaacgcaatttattacaaaaataataattctaatatacttgaagaaaaaacaatttctaaaaaagatgttgttaaaaaatattctgttgatatacttggtaaaattggtggtgaaattaaatgttccgtaccgtttttgtcactggaggagaatatttaa

SEQ ID NO: 44 - DNA, 3249 bp, Unknown
  Synthetic sequence or sequence of unknown origin
atgagttatgggattggtttagatattggtattgcttcagttggttgggcaatagtggaccttgatcaaaatgaaaatccaatgggtattattgatttgggagcaagaatatttgatgctgcagaaaatccaaaagatggagcatctttagctttacctaggcgtgaagctaggtcagctcgcagaagattacgcaggcatcgtcatcgtatggagagaattaagcgtttgttagttagttcaggtattattagtgatgtagatttagaacatctttttgatggtcagttacaagatatatatgaattgcgtgctaaggcattggattattctgtaaccaataaagaaatggcgagaatattattgcacttggcacaacgtcgaggatttaaatctaatcgtaaggcagaaaactccagcaaagaaaacggagaattattgacagccgtttctgctaataccgagcgtatgcgagaaaaacattatcgcactataggtgagatgttctataaagacgaagtgtttgctacatataagcgtaacaaaggtgagaattatttgtctacagttcagcgtgatatggtggaagctgaggtccacaagatttttgatgtgcaaagaactttggggaacaaccaatttactaaagaatttgaagatgcttataaaggcattttgttgagtcaaagagcgtttgatgaagggcctggaggcaatagcccctatggaggtaatcaaattgaaaatatgattggtatttgtacctttgaaaatgtacgacaagggaaagaaaaaaatgaacaacgggcagctaaatctacatttactttcgaatactttaatttgcttcagaaagtaaatcatttgagattggttgtggatgggaaaaacattccgctggatgatgaacaaaggggaataatcattaaattagcgaaaactaaggcggatttgaaatatagtgctgttcgtaaagcattaggaattgcagacaatattttgtttgccgggttaaactatgcggataatgatgttgttgaatacgaaaagaaacaaaagtttgatgtaatgaaatattaccatcaaatgcgaaaagcgttggacaaagtagagaagggtagaattgctaaatataatccagagcagttggatgctattgcgacaatattaaccaaattcaaaggtgatgataggcgcagggaatgttttgcagcaataggtattgatacaaaggatgttgaccaattgctggacattactggtgtatctaaatttggtcatctttcaatcaaagctttgtcaaaaattattccatatatggaaaagggagcattgtataacgaggcctgtgaagctgctggctatgattttagagcgcatgctggtgggactaaggataaattgttgccagcctacatggaagaaatggatgatattactagcccggtagctaggagagctatttcacaaacaatcaaggtaatcaatgctatcattcgcaagcagggtgaaagcccgatttatattaatgtggaattggcaagggaaatgtctaagaactttaaagaacggggtgagattaccaaaaagaatgaggaaaacagagctgccaacgaaagattaatggaagaaatcaaaaccaactttggcgtggacaatcccacagggcttgatttggtgaaatataagctctacaaagagcaggatggtattactccctattctcagcaagcgttggatttatcccggttgtttgagccgggttatgttgatgtggatcatattgttccttattctatttcatttgatgatggttatgtgaacaaggtgctggttttgtctagtgaaaacagagaaaaaggaaatcggttaccgttggtatatttacaggagaagtttggccaacaggcagcggataatttcgaagtttgggtaactaataatgttaagaattaccgcaagcgtcaaaagctgttgaagaaagctataactgaggaagatattaacaaatttaaagaacgtaatttgacagataccaaaactattgccaggttcatgttgaattatattcgagattatctggaatttgctccttcactgacggataagaaaaaaagagtaacagcggtaaatggtgctgttactgcatatatgcgtaagcgttggggcattgctaaagtaagggctgatggtgacagacatcatgcggtagatgctttggttattgcttgtactacggataaaatgattatggaagcatcttggtacagcaatattcaggaaacggaaacgaatagggaacttttacaacaaaaatttcccttgccctatagcgacttcagcagagaattatctgcaagattggcacctaatccggtggcagctcttacacaacaaaatttactgtactatattgacaaggatttgaatgactataagcccatctttatatcccgtatgccaagacataaagtaactggggcggctcatcttgaaactattcgaggtgtgaaaatgttggatgaaggatgtactgtcgccaaggttgagctgactgcattgaagcttaacaaagatggtgaaatagatggttattataatccatctagcgatttaatcttatataatgcattgaaagcaagattgcaacaatttgataatgatgcaaagaaagcatttgctgaaccgttctataaaccgaaatctgatggtacgcctgggcatttagtaaaaaaagttaaggtattcaaaaaatccactctgaatgtagctgtgcataaaggaaatggtgttgctgataatggtgatgtaataagattggatgtgtatcatattgcagacgatggttattattttgtgccgatttatgtggcaaatactataaaggatttgcctaatagagctgttgttaatggtaaatcatataaacagtggaaactaatgaaaccagaagattttattttttccttgtatcctaatgacttaatacacgttgtaagtcgtaatgaaatatcaatgtcaagagtttgtgctgaaagtacgttgccggagaaaaaagagtgtaaagaagagtggctatatgttcagcaaggattcgctggtacaacggttacggtgattaataatgataacacgtatatcgtaaagagccttggacttagaaaattacaattgttggaaaaatatcaggttgatgtgcttggtaactatgtaaaagttgaaaaagaaactcgtcaaaaatttaaataa

SEQ ID NO: 45 - DNA, 3249 bp, Unknown; identical to SEQ ID NO: 44
  Synthetic sequence or sequence of unknown origin

SEQ ID NO: 46 - DNA, 3198 bp, Unknown
  Synthetic sequence or sequence of unknown origin
atgagattagtacttggactcgatattggaatagcatctgtcggctatggaatcatcgatattgaaacaggagacattataacttcaggtgtaaggctgtttactgaagctgataagaaaaacaatgaaggcagaaggtcttttcgtagtggacgtagattattaagaaggaggaaattaagaaaagaagaactgaaagaattgttgaaagacaacggtgtctatgaatgggattcatctttagatccttatatttgtagagtaaaaggccttaatgagaaattatcaaatgcagaattaacaacatcgctacttcatatttgtaaacatcgcggtagttcattggaaactgtggaagatgaaaataataaagaagatggattaaagaatgttttgactgaaaatgataatcttattaagcaagggaaatatgtatgtgaaatacaattggaaaggaaagaaaaaaaaggtaaaattagaggcattaataacaatttcagaacaaaagattatgatagtgaacttttgaaaatattatcaaatcaaggactggatgagaacataaataaaaaaattgaggatattatcaccagaagaagacatttttctgttggaccaggtagttttatttcgcaaactatatatggccaagtatacaacgaagatgggacagtaagagaaaatatgattgaaaaaatgactggaaaatgttctgtttacccagatcaattacgttctccaaaatcagctccatccgcgatattttttaatttattaaacgatttaaataatttaagagttgctgatgaaccgattgatgttgataagaagcaagaacttattaaggaagcttttgaaaagaaatcattaactcctttaaaagtggcgaaagtattaggagttaacctagatgatatagaaggctttaggaagaatgaaaaatcccttccaattttaactgatttagcagactttaagataatggttaatatttttgaaaagaatgggtacattattaaagtcgaagacttagaattactagatgaaattgctgtaattattaccaagacaaaagtaaaaaaagaaagaatagatgaaattaaaataaaaggtgtagttaacgaaaagattctagatgaattatcagatatcacaaggtttactggttatcatagtttgtcattaaaagcaattagagaattaaacaaagagttgtatgaaactacatacaatcaaatggagattttatcactatcgaaccattttgagtttatacattctaatttcagtcaaaaagggaagaaaaagatagcaataaatcaggatgctattctttcacctgttgctatgcgttcatattgtcaagcaataaaagtagtgaatgcagctagaaagaaatatggggaatttgaagcgattgttgttgaaacaactagagataaaaattcatatgaggaaaaaaagagaattaaagaagaaaatgattttttcgcagaactaaacaaaaatgctgaggagcttgttaaagggtacaatgtaaaacttgatggcaaattgcgaacaaaattacgcctttatttagaacaagattgtaaaacaggttatcttcaagaaccaattgatttacctttgttaatcaaagatccaacagcttatgaaattgatcatattattcctatttctatatcattagatgattcgtataataacaagacacttgtaacaagatatgaaaatcaaaaaaagggtaacaacactccaataaaggcttatgaatcagataattttttaaacaaagatgtaaatgagtataaaaagttcattgctagtatccgcaataaacaatcgggtatttcttggaaaaaatataataactatatgtattcaaaagatattacaaagtatgaagttatgaaggaatttattgctagaaacttggtagacacttcatatgcaaatcgcttagtatttaatacgttaactagatatttcaaagataatggaataaatactaaagttcacactattagagggtcagttactagtgcgtttagaaagttggtaaaaggattagaaaaggatagagataaagattattcacatcatgcaattgacgctttaattgttgcttcagttaagaaaatgaatctatttgataaactattaacagatttcagtattgctgatgatgggaagaatgtaattataaataaagatactggagaaatatcaaaaattgatgatgatttgtatttcaaagatgcaccatttttaaaatttttaaaatcattactgagatataaagttactgattactcttatcaaatagatacaaagcctaatagaagtattgcagatcaaacaatatacagtacacgtaatgtagacggcaaggattatactgttaaaaaaattaaaaatatttatgatcctaaagctacaactcttgcagatgatatcgttaatggcgtaactggtaaatatttaatggaaaaaaatgattcacaaacatatcaaaagattgtggatattgttaactattacgcaaaggagtatcgaggaagcgataaactaaaagatgataaagggaaaaagaaatttgttactaatccattaaaagaacatttagatgaaacaggagaatatattacaaagtattcagtaaataataaaggcccagttattacgtcaatgcgttattttgatggtgaacttggatcacatatcgatataagtcagaattacaagaatataggagacaaaaaagtagttctattacaaatatcaccttatcgtactgatttttacaaagatgaagggatatataagtttgttacggtaagatactcaaatataaaatattataaaaaagatgatagttttgtaataaatgaacaatggtatttgcaagaaaaaagaaagaaagctatatcagaaaatgcagaattttgtttttcaatgcatcataatgaatacattgaaataaaatcatcagatgaatgcaatctatatcgttttaccgcaaccaataatgataaagcaaatacaattgaagtgaaagaaattgacagatatgagaagaagcaaaatataaaaactattggcaagaaaatcgttgaacttaaaaaatacagttgcgactcgcttgggcaacttagggaagtcaaaaatgcaaggttgaaattaagactaaaatag

SEQ ID NO: 47 - DNA, 3147 bp, Unknown
  Synthetic sequence or sequence of unknown origin
atggaacagaaactgaattatgtgatcggattggacattggcattggttccgtcggatgggcggcgattaacctggacaaacgccgtattgaagaatccggagttcgtttgtttgactccggggaagtcttagatcaaaacaaaaggaaacgaacaagtcagcagcgccgaggatatcgctcgacgcgccgtctcgttcgccgtcgagcgcatcgaacggaacgaatgaagcaatggcttgaaaagatcggactcgtttccgcggaaacacttgccgaatactatgaagcgccgacagcgcatccattggaactgcgcgtgcgcggcttgacggaaaagcttgctcccgcagaacttgccgctgcattgctgcatatcggaaagcatcgcgggttcaatgagttttatcagcttgacgaagaggagaagaaatctctttccaaagaagaaaaagaagaccgctcccgcgcggaagcatatgagcgtctgattcaagttatgccgggaatggcgccggcacaactgtatctttctcacccgatgtttatgtctgagttcggcgtgcgttatcgcaatacaaagaaacaggatgaaagcaagaaggtactcgttccgagaacggaaatcgagaaagaaacacatcgcatctgtgaaaagcaggcgtcattttatccgtgccttacggaacaaaatcgtgaaaagatctatgagattttgttccggcagcgcgattttgaagacggtccgggcgatccgaacgatgagacccggcaatacaagggatttctggatacgatcgggaactgccggttttatccggaactgaagcgcggcgcacgtcaatccgtgctcggcgatttgttcgtattgatcaaccgtctgtcgcaaaaccggtattttagcgcagagaccggagaggtcgtcgattcggctgatgcgtatcgcgaaatcattgaaacggcgctgctgaacggttctctggaaatgaaggaggtcggcaagatcctgaaaaactacgggatcgaaatgctgaacgcaaatgaagaaaaggcagattctccgaaccgctgccttgcgtttattcggatgatcaagccgatcctggagaacaacggctatgattgggacgctgtaatccgcgccgagtatccttttacaccgtataatgaggattcttttttgaatcgggttggaaagattctctccgaaaaccgcacaccgcagagacgggtcgatctgctgaaaaaggcgggtgtttcggaggggattgccgacgcgctcgcaaagcgtaaaacaggcggtacagtcagcgtgagcgatcggtatatgctcgaatcggttgaagcgtttatgaacggggagctgttcggaaactataatgcccgcagagaaaaggacctgcttgcgcaggtacgtaccggaaagaaatataaaaagctgccgccgatcgagaaaggcgattatgtggacaatccggtcgtgttccgcagcatcaacgaaacgcgcaaagtcctcaacgcgatcatagagaaatacggctcgccgaacgcgatcaatatcgagatcgccgcggacttatcccgtacgtttttggaacgtgatctgatgcggctggagaacaatcgcaacagaatcgaaaccgagcgcattcaaaaaaagatcgccgaactcttgcatacaaaggacgagatcatgcctgtgcaggtcgaacggtatcgtctcggcgaacagcagggatggaaatgcccgtactgcggcgcgccgatcacgatggaaactgcgattcaaaaggacgagcgttcttatgagatcgatcatattgttccgtattcgctgattctcgacaacacacagcacaataaagtgctcgtacatcacggctgcaatcaggcgaagggacagcggacgccgttgatgtacctgtctgccgatgctgcgaagaaaaaagagttcatcaaatgggtaaacgcggcatatgcaaagaaacagatttcaaagcgtaaacgggaatatcttctgcagcccgatctgaatgacgaacagatgcaggagtggaaaacgcgcaatctgaacgatacgcgctatatcgcaaaataccttgtccgctatctgaacgacaatctgctgttcgattccgaagaaaagaacaatgtgtatgccgtgaaaggcgcgatcacctcgcagcttcgccgcgtttggctgaacaaggatacatggggcggggatgacaaatccgagctgcgcaaagagagcaatctgcaccacgcggtcgatgctgtcgtgatcgcaaactgtatgccgggttatatcgaacttgccgaggaagcgcttcgcctgcgccgcatgtaccatgaggaaggaaagcgggagacggaaaactggacagctgtgctgaacaatgctgttgacaggctgtatcggtattatcgcatgccgaaggcgtatgcggagcagatgctgcgcaacatcaagcgcattccgtcgttcatcccggatttgagcgaagaggtcgacgcccggttctgcgattgcggactcgaaaacgagaagcagtaccgctcaaagctccgcgcattctatgcggatgatctcgcgtttgccgcagggatccgcatgccgttggtttcgtataagccgaacaggaaagctacaggcaagatcacggcggataaggctgtgaaaaaaggcacatcacagagcttactggttaagaagatcgcggaagacaacacgacgacattggatgacgcaagttactactgtacagaagtataccgcaaaaaggacggcacgcttggcctacgcggtatccggtattctatgctgaaacgggataacgggaaaattatcctgaacgagcagccaccggagaattacgcggtgcatattatgtatttgttcaagaacgactatctccggatctatgataaaaacaacaagatcaagtttgaagggtattatttgtccgtctatgatatgaaagcgcagagaatatatacagcggatcgaatcaagggcagaaacgaaaaatcagtgggcatcttgaaaaacgatcgggttgagaaactggacgtttctatcctcggtgatctcggaggaattcagtcatgtggaaaaccgttcttgtcggaagtgacgcgatcctga

SEQ ID NO: 48 - DNA, 4458 bp, Unknown
  Synthetic sequence or sequence of unknown origin
atgaaaaatattttaggtttagacttgggaaccaatagtattggttgggccgtggtctcaaaaagtgatgatgggaaatacactcaggatattaagctgggaagccgtattatcccaatgagccaggatgtactgggcaagttcgacagtggagtaacagagtcacaaactgcagtacgcacatcgtatcgtggtatgcgtagattaagggaaagatgcctcttaagaagggaacgcttgcacagagttcttcacgtgatgaatttccttcctgagcattatgataatgccttaggctggaacaagaaccagaattccacttatggaaaatttctaaatcatggtgagcctaagctggcatggagaaaagacgaaacaggtaagatgcagttcctcttcatggattccttcaatgaaatgctggcagattttgccaaacatcagcctgggcttttagctggtgacaagaaaatccctttggactggacgctttattatctgcgtaaaaaagcacttactcagcccatcagcaagcaggaactggcttggattatcttgaacttcaatcagaagcgtggttactatcagcttcgtggtgaggaagaggaacaggaaaagaagaataaactggaagaatactataaactaaaagtagtaaaagtagaagctaccgatgagcagagaggcgacagccgatggtataatatccaccttgaaaacggatggatatacagaagagccagcaagatgttcctggacgagtgggtgggcaaagaacgtgagttcattgtcactaccgacattgatgagaacggaaaccctaaactggacaaggaaggtaatgtgaaacgtagtttcagagctcctggagcagacgactgggcactgcagaagaaacgtacagaaaactctattgactcttctcacgttacggtgggtgaatacatttacgataaccttctaaagaacccttcagagaaagtaagaggtaagctggttcgtaccgtagagaggaaattttataaggaagaactgaaaagaatcatcagcaagcagacagaatttatcccagaactgagggataaggctttgctggaagactgtattcgtgaactttatgcacggaacatcccgcatcaggatagcttgaagaagaaagatttcgtgtacttgatagtagatgatcttttgttctatcagcgccctttgaagagcaagaaatctcttataagtgattgcccttatgagtcttacccttatgtagataaatctactggggagattaagactcaacacattaaagttgtagctaaatctaatccttacttccaggaattccgtctgtggcagtttattcagaatcttcgtttgctagaccgtgagagcctgaatgaggatgatgtaactgctaaatacttgcagactccagaagactatactaaactctatcagttcctgaacgacaggaaagctatcactcaggaacagctgcttaaggatttcttcgggttaaagaaacccaagggaaaagataccaaatattctctgcgctggaactatgtggaagataaggaatatccttgtaatgaaacacgttaccttatcctttctgcccttaaaaaagcagaaatagagccttctttccttacccgtgaaatggagcagagactctggcacctgctttattccgtagaggacaaaaatgaactaatccatgcactggagaagctgcaaaaagaactagaacttcctaattctttcgtagaagaactgaagaaaattccatcgttcaaaaaagaatatggagcctattcagagaaagccgttaagaaactgctttccgtaatgcgtatgggaacctgctggagtgaagacggaattcctgcttctgtaaaagaaagaattagtacaataataaaaggtgaagcacaagatgtggctctggagaaagctgctaatcaacacatttccttagcagaactaaaagatttccagggattaccagtatggctagcttgctatgtggtctatggtaggcactcagagagtagtgagattacacgctgggaaacacctgaagacctgatgatttttatccgcaatttcaagcagtattccatgcgtaatcctatagtggagcagtgtgtgctggaatctctccgtaccgtgcatgatatttgggtaaaatacggacatatagatgaaatccatttggagctgggccgaaacatgaagagcacagcagaggaaagagcaagaatctcagagcgcaatttggctaatgaaaataccaatcagcgcattaaatatctgctcatggaactgaagaacgatgggaacatttccgatgttcgtccttattctcctatgcagcaggaaatactccgtatctatgaagaaggagctttgacagaactttcccgtgaagacccagattttgcagagatttccagaatttctaagttggcacagcctacctcttcagaattgactaagtataaactctggttggaacaacgttatcgttctccttatactggaaagcctatcccattatcacgcctctttacaccagcttaccagattgagcacgtaattcctcagagccgtttcttcaatgactccctggtgaataaggtaatttgtgaggcagaggttaatggtttgaaatctaacatgctagggttggagttcatcaaggctcatggtggtgaagtggtgcattgtcctaccttgggaaatgtaaccgtatttacagaagaacaatacactaaatttgtaaaagaccactattctgccaatcgtgccaaattgaagaatctgatgatggaagatattccagaggaattcatccagaggcagatgaacgatagccgatacattagtagggtagtgaagcagctcctgtccaatgtggttcgggaagaaaacgaagcagaagctacttccaaaaaccttatcccatgtacgggtggaattaccgacagactgaaacaagactggggcctaaacgacatttggaacaagatagtttccccacgtttccagcgcatgaatgatttaactcaaagtgatgcttttggacattgggaagacaaagacggaaagaaagtattccaaaccaccatgccactggagctccagcgtggattcagtaagaaacgtatagatcaccgtcatcatgccatggatgcgctggttatagccttggcttctagaaatatagtgaattacttgaacaatgaatctgccaatgatgaaaaactaaggcatgaccttaagagactgctttgtggtaagggtggagtcattctgaagccatgggaaacctttactcaggatgcttataaagctcttcaagacatcgtggtaagcttcaagcattatatccgtgtcatcaacaaggccagcaactactatgagcattacgatgagaacggaaagaaggtcactgtggctcagaagggagaaagcatgtgggccatccgtaaaccattgcataaagaaaccgtatttgcccatgtgaatttgaggcgagtgaaagcaattccatttaataaagctctggaaaatccctctaccatagtaaataaagacttaaagcatttgattaagactttgatggaagatggcatggataaaaagaaagtcttgaatttcttcaagaaagaagatggtcttaagttccatggtcaagacatcagtaaagtggaagtttactattttaccgatgatgtagaaaagatggtagcagtacgtaaaccactggatgatagtttcgatgctaagaagatacaatccattacggatacaggtattcagaagattcttcttaactatctggctacaaaatacaatgacccgaaagtggctttcagcccagagggtattatggaaatgaatgagcatattgaagagttcaatggtggtaaaccacatcagcctattcttaaggtaagggtgagtgaaactctaggtgaaaagtatcctgtgggttacggttctaataaagataagaaatttgtggaagcacaaagtggaaccaatctatattttgctatttatgaaaataaggctggggatagaaattatcagacaattcctcttaatatagtagcagagaggatgaagcaaaatttgccaccagttccaggagttaatgaaaatgataaattaaagtttttcttatctcccaatgatttagtttatgtaccagaagagtctgagcaaaatgcagggattgatgaattatataaggaacgcatatataagtttgtttcatcaacaaaaactcaagcgttttttatccctagcaatgttgcttcagtacttatgaataaggttgaattccagtctttaaataaagctgaaagagcaatagatggccaaatgataaaggctgtttgttggaaacttgaagtggatagattaggtaacatcgtaaaaatcatcaagtaa

SEQ ID NO: 49 - DNA, 4086 bp, Unknown
  Synthetic sequence or sequence of unknown origin
atgaaaagagttttaggcctggacttaggtaccaccagtataggatgggctgtagttgaccaagctgcatctcaagaagaaaaatcaaagattattcaactgggagtgagagttaatcctatcacggtcgatgaacaaagcagctttgaaaacggcaagagcatcaccacaacagccgatcgcaccctcaagcgaggcatgcgtcgcagcttgcaacgctacaagcagcgtcgcgagcatcttgtcggtctgctgaagaaacatggaatcatcaacgatgatacgctactgaacgagaatggcaatgcaaccacgtttcagacctatcggttgagggcaaaggcggctcacgaggaaatctcacttgaggaatttgcccgtgtattgcttatgataaataagaagcgaggatataagagcaaccgtcgcgccgacagtcaagaagacggcgaactcatcgatggcatggcggtggccaaaaagctctacaacgagcatctcacacctggagagtttgcctaccacattttgcagagtggcaagcgctttatcccgagcttctatcgctccgacttgcagaatgaatttgataagatatggaattgtcaaaatcaattctatccacaagtgctcacggccgaactcaaagataaactcaccgaccgcagcaagaaagataccgaaaacatcttttttgcaatacatcacatctcttcagctacagtcaaagaccgcaagacggccacactcaccatttacaagtggcgtgtgcaagcgcttcggcaacagctcgatttagagcaggtagttgcagtgcttgccagcttgaacggcgcaattgcaggagcaagcggttacctgggccacatcagcgacaacagcaaggagctctacttcggtcacatgacggtgggggagtacttgatgcgcggtcttgagcaagatccgcatttccgcgtaaagaatcgcgtgttctatcgtcaggattacttgaatgagtttgaacagatatgggagactcagcgtagatttcatcctgagctcactgctgagcttaaagaaaaaataagagataccgtgatcttctatcagcgtaaactcaagtcgcagaagggacttattgcctattgcgagctcgaaggtagagaaatcactgtgaaggtcgatggcaaggagaaaagagtgatgactggccccaaggtgtgtcctcgcagcatgccgctgtatcaagagtttaaaatgtggcaggtgataaacaacctgcgcctgcaatccaaaatcgatggtacccaagtgcctctcaccatggagcagaaaaaactgctgcatgacgcactcaacgttgagggcgacatgcaggctgcccgtgtgctcaaggtgcttgcattgaagcccaaggattatggcatcaactgcgacgaggtgccaggcaacacaaccaatgccgctcttttcaagaagtataagagtatcgtggaatggacaggccacgacgtggaaaaatttgacaagctgtcggccagcgagaaaatcgcacttgtagagtcggttttcaaagcgctcaagttcaataccgattttctcggtgacggctgtgacgagcaaagcaaggcattcaggctgtggcatttgctttattcctatgagggcgacaactccaacacgggcatcgacaagcttgtcgaccacatttgctcgttgacagcgctgccggccgactatgccaaggctgtggctcaagtgaaatttgacgacgattacgggtcgcttagcgccaaggctatcaagaagattctgccctacatgcagcagggcatgatgtacagcgaggcttgcgaggctgcaggctaccggcattccaagtcgtcgctcacgcgtgaggagattgctgctaagcaactgttgcagcatcttgaggtgttgcccaaaaactcgctgcgcaaccctgtggttgagaaaatcctcaaccagatggtgcacgtggtgaatgcttgccaagatgcctatggccccttcgacgagattcatgtcgagatggcccgtgagctcaagctcaccagcaagcaacgcgaggagcgcaccaaggccttgaaccagcgcaccaaggagactgaagaaatcaagcagaaactgataaaagatttcaacgtccctcatcccagccgcaacgacatcatcaagtatcgcctttatatggaacttgctcccaacgggttcaaaacactctataccgacactcctatttcgcacgagaaactgtttaccagggagttcaatattgagcacatcattccacaagccaagatgttcgacgactcgttcaccaacaaaacgcttgaaacggccgaggccaatttggacaagtcaaagatgacggcctacgactatgttctctcacgacaaggcgaagagggtgccaagcgctacaaggctaagattgaaaagctctttggcgcctccaatcccaagaagtgcgagcgcctgctcatgcgcgagaccgacatccccgatggttttctgaatcgcgacttgagcgactcgcaatacattgccaggaaagctaaagaaatgcttgggaaaatcacgcgagtggtggttcccaccacaggtgcaatcacagcccggttgcgtgaggactggcaaatcgtcgatgtaatgaaggaacttaacctcgaaaaatatgagaagcttgggcttgtcgagacctatagtgatcgcgacggccgttgcgtgaagcgcatcaaggactggagcaagcgcaacgatcatcgccatcatgccatggatgctctcgccattgcttttacccaacccagccatatccagttgctcaatcacctcaacgctcacgagagtgacgacataaaggccaacgcctatgcactcatgcgcaggaccctcaccaagggcggcaccttcattcctcccatggagaactttagaaccgtggccaagaagcatctcgaggccgtgctggtttcgatcaaagccaaaaacaaggtggtgacgccacacgtgaaccgcatcaagggctcagctcatcatcaactcacactcacccctcgtggacagttgcacaaagattttttttatagtaagaaatatttttatgctactaaagtggagaaagtggggaaatcttttaatgccgctaagatcgcaactgtgtgcaaaaagacttatcgtgaggccttgctaaggcgactgcaagagtacgggggcgaccctgccaaagcttttactggaaagaattcacttttgaaaaatccactttatgtagatgaaagcaatatgaaagtagtcccgagcaaagtaaaaactgtgacaatggaagagtttttctctaaaagaaacttagttgataaagacttgaaaattgatgatgtcgttgatgaaggcattaaggagattctgcgaaagcggttggatgagtatggcgatgttaatgaagcctttgccaaccttagagataatccaatttggttcaacaaacaagcagatattgccgtaaagcgagtgaccaccaaagaacgtattaccaatcccatttatatacatgagaagcgagataacgcgggtcgatttatattagatgaaaagggaaatcgccgacctaatgattttgtgaacccccgcaacaacaatcatgttgcaatctttgaagacgaggacggcaacttacatgaacatattgtctccttatacgatgcggtaaatctggcacgtaaaggtctgcccattgtcgacaagctttacaacagcgacaaggggtggaaattcctgtacaccatgaagcgcaacgagctcttcgttgtgcccgacctggagcatggcttcaaccctgccgagattgacttgatggacgtgaaaaactatcccgcgataagcaagcacctgtatcgtgtgcaaaaaataacaaaaaaagattattttttcaagttacatattgatacgacctcagagtttcaagcaccactaaaagatattcattggaagcgtatcactaaagaaaatgatttaaaggggtttgtaaaagtgcgagtcgaccacattggccacatcgtggcagtgggcgagtacaattga

SEQ ID NO: 50 - DNA, 3327 bp, Unknown
  Synthetic sequence or sequence of unknown origin
atgaaatataaattgggtttggatttgggcagcacttctttggggtgggccgcggtaaaattaaatgatgcaggtgcggtggaacaactgttggatttcggggtacgtattttccccgacggccgtgatgccaaaacacatgcgccaattaatgtggtgcggcgtgcggcgcgtaccatgcggcgtcgtggtgaccgtgtaaaactgcggaaaaagcgtgtgttgcagttaattcgaaaatacggtttggattttgatattcgttccaaccccattttggaaaatccgtatgaattgcgtgtccgggcactggaacatcgtttaagtccgtctgaactggggcgtgtgttgtttcatctggccctgcgccgtgggttcaaaagtaatcgcaaagaaaccaagggtgaaaacggcggtaagttaaaggcggccacagatgccttggcatcgacggtcggggacggtacgttggcccagttccaggttcagaccaaaaagttccgcttttccaatcagtttgacggaaatgttatcaaagacggggcactgtatcccacacgggatatgtatttggatgaattccatcgtatttgtgatgcccagggattggataaggaaatgcgggccgcatttgaaaacgctattttctttcagcggcccctgattcccccggtggttggtacatgtatttttgccgccgggcagccgcgtgcgcacaaatttgaacccgtgttccagcggtggcgtgcgttgcaacagttaaaccagttggcgattttggataatggacaaaacgtagccttgacggatcaacagcggcaatgtctggtggatattttgctgtataattttaacggggtaaagcgcgacaggggcggccgtgtaaaaattacgttcgcggaaataaaaaagcagctggggctgtcccgtacagtgaagtttaacctggaatcagaacagcgcaaggaattgaatgttgattcaactggtttcagttttgccgaaattggcgaactggatttttggcgttctttgaccgatgaacaacaatccgatgtattgaataaaatcaatgacgaccagacagaagatgccgaattgattgaatatttggtggcacattacggattgtctgcatcacgcgcgcgggcaataattgatatccccctggaagatgatgttgccaatgtgtccgtggtggcgatgaaaaaaatgctgccgtttttagaaggggggcaattatatcatctggcggtacattcggcggggtatcattatggcgaacaagatgtgccattaatggataaattaccgtactatggtgatttagatgtgttaaagccgtcattaatgcccgcgcgtgacggtgcataccggaccatgaatgcaacggttcacattgccatgaatcaaattcgggtggttgtaaacgatttgattgaacgttatggtcggccatgcgccattaacatagaattgggccgtgatgtgcgtgcgggtgccaaagaacgcgccgaattggacaaacagcaatctgccaacaaacgcaagaatgacgctattcgggcggaactggccgaaatcggcatattaaacccatcccgcgaagattttcaaaaatataagttatgggaaaatttggcgccccagccccagaaccgccggtgtgtctataccggcgaaccgattaccagtctggccgcgctgttcaaaagtgggcggtttgaaattgaacatatcttgccatttgcccagacattggatgattctttggcaaacaagaccatatctgccgttgccgctaaccggttcaaagggaaccgcagcccggccgaagcatttgacgatccggcatccccatgggcgtatgcagatgtttgggcgcgtgcccaaaatctgcccgatggcagtcgttggcgctttgaccgggatgccatggaaaaattcacacggcacggtgattgtattgcacgcgcattaaatgatacccgttttatgtctgtgatggcggttaactatttaaaacatatctgttcggataaaaacaaagtccgtggattgccggggcgtttgactgcgatttttcgtgatatgtggcacttggattggtggaaaaaccacgatgatgcggacacatatcgcgccagtcatatccatcatgccattgatgcgtttgtgattgcgtgtatgggggcggggaatttacaaaaactggccgaaaatgccacgcatctggaagattttcatggaaaaacactgaaagaaaaacatcgtcaattgtttgcggacatgtatctgccgttcccggaatttgattactatgattttcggatgcggtgcgaagcatgtgttatatcctatcgcccatctgtaaaagaaccggccgcatcggatactgttggatgtctgcacgaagatacggcgtataagttggaaaaattcgaaaccggaacgcgggcaacgatgtcacgccggattgccttgccaaccacggcggatgcgcgtgccaaatttaagaaggattttgattcgctgaaccccaaaacattggaaatgtttttggccgaaaccggggtggcaaacgatgcaaatgacatcgcagaccagttcttgaattggtgccagatgcgcggaattaaaaaagtgcgtatgtttaagacccgggtggatacgacgacttatgttccggtgtttcgcaatcgcggggataaaaatgcgtttaaccgtgcgtggaccgaatggtatgcggccgcgggtatcgcgcgggggatgacagaaccaaaggctaaaaaagcccagcaggaaaaggaaaggcgtttattggcgctgtatcaaaatgccgccgcccgtgcatacaagtggtttgtcagtggaaataatttttgtgcggatatattcgaaattcgttctgatgaccgacgctatcccgcattggccggccagtggcaatctgaaattatatccaattactgtgccacattgaataatggcacgcccatgtggcgttgcaaatatgcaacggcccggcgggtgatgcggctcagaatcaatgatatggtcatggcggaattttcgcgggataatgtgcctttgctcaaagggttggaagacgcggtgcgtcatcaattggccgtgcaagacacagatacagtaaatattattttcagggtaaagaaaatcagcagcaatggtgcaatatttttgcgaccgcattatattgccaaagaagatgctgatacaaaaacatggcaagccaatgcgacatctttgcaaaagtacaaggcccgaaaaatacgcgtcagcccaacaggaaaagttctagaataa

SEQ ID NO: 51 - DNA, 4047 bp, Unknown
  Synthetic sequence or sequence of unknown origin
atgagcataaaaagtgattattttttaggacttgatattggtacggattctattggatgggcggtaaccgacccagaatatcacatattgagacgaaaaggtaaagcattatggggaataagattatttgatgcggccaatacagcggcagaacggcgaacatttaggacaagccgaagaaggattcagagaagacgacagagaattcggttattgcaagaattatttgcagaagaaatggtaaaattagacccaggattttttcagaggttgtcagacagcgcattttggcaggaggataagcaagagcagcaaatttattcactttttacttgtgaaaattatacagatgttgattattacagagaatatcctactatttatcatttgagaagtgcattgattcaggaaaagaaggaatttgatcttcgtcttctatatcttgctcttcaccatttgatgaagcacaggggacatttcctgtttaatgggagtattaataatgtgacgtcatttcatacgacgtttcagacgtttgcagattgtctttatgatgagtttgatatagaactggaatgtgattccgaagatagatttgcagaaattttaaaggataaacatgccagaaaaacaggaaaatgttctgaattagagataatctgtcatatagaaaaatcaaataagcagctaaaagaactttttaaattaattacaggaatgaaagctagtttgagtgttgtgtttggtgatgatgagttagcggaaatagaacataataagattagtttttcagagagtagttatgatgaagtacgtcttgcattggaggatgagattcaggagaggactggtatactggatatctttcatgcagtttatagttgggcgattctcgcggatattttagaaggcggagaatatgaggggaattcttatctaagcgttgcgaaggtaagcacttataaaaagcatggtgatgatttgcggttgctaagaacactggttcgggaatattgtcctgatcattacaaatctttcttttccgtatcagggaaggagaattattgtgcatatgcgggtactttaaaaaagaatggaaaaaaacagccgattaaacgttgcagccaggaagatttttataaagcgttaaagaaattgctgaatcagatgccgacagaacaaccagaagtgaaagacatcttcatcgaaattgaaaatggtacttttttgccgttgcaggtaagtaaggataatggagtgataccttatcaggtaaataagatggaattagaaaaaatcctgcagaatgcagaggaatatttgccatttctaaaaaatatagatgaagaatgtggaaaaacggttagtaagaagattatagatctctttgagtttagaataccatattatgtagggccgcttaataccgctaaaggagaaaactgttggatggtcagaaaagaagcggggagaatatatccgtggaattttgatgaaaaggtagacagagatcaatcagcagaaaaatttatccgtagaatgacgaatcagtgtacatatttaatacatgaggatgttgtacctaaaaattctttgctttattcggagtttatggtgcttaatgaattaaataatgtaaagatccggtctgagaagctgccggtggagttaaaacaggcaatagtattggatttgtttaagaaacaaaagcagataacaggaaaaaaacttcttaattacttgaatgcaaatggatatgatgtaaaaaaagaagatttgtcagggtttgacggaaactttaaatcatctctgtcatcatatcttactttgaaaaaagtatttggtgaagaattagataaatatagtgtgcagcagatggcagaggatattatcttgtggatcactctgtatggagatgatcagaagatgttgcgcagggtaattcgaaaacattatgaacagcaattgagtgaagaacagattctttccttatcgaaattgaaattccaaggctggggaagattatccagacgacttttgagtgaaatggaaggcgttgattgtgagactggtgagtgtatgacggtcatgcaaggacttcgtaatactcagaataatctgatgcagcttctaagtcagcagttttcatttatggaattgattgaggaagaaaatgggaattattatgtagatgagattacatacgataatcttgtgaaagatatggttatatctccgtcagtgaagagagcagtctggcagacagttcagattgtggaggagattaagggggtaatgggctgtcagcctaagaagatatttgtcgagatggcgcgaagcgatgaagagaaaaagcgtactgtatctaggaaagacaggttattagaagcatatgatgcgatcaaggatgaggctcgtcaatggcaggaagagttgcaaaagtattcagatggtgattttaaggctattaaactttatctgtattatacgcagatggggcaatgtatgtatactggaagaaagatagatctgtcacaattaaatgatgcgacggtatgggacagagatcatatatatccacagtccaaaacaaaagatgatagtctggataatctggtattggtagaccggagcgtgaacgctaagaaaagtgatgggatgctatcacctgagattcagcagagaatgcgggctacttggaaatacttaaaagagaaaaagttgatttcagagaagaaatatgagcgtttgactagggtctcaccacttacagatgaggaattggcaggttttattaatcgacagttagttgaaacacgtcagtcttcgaaagcagtagcaacacttttgaaacgagtatatgatgaagcggagattgtctatgtaaaagcggaagctgtttcaaattttagaagagataatttggattatattaaggtgcgtgatctgaatgattatcatcatgctaaagatgcatatcagaatattgtagtggggaatgtttttcatgagaaatttaccagcaatccgcttcgttggctgaaaaacaatcctaatacgaaatatagtttaaatcagatgtttaactttgatttagagaaaaatggggtggtaatatggaaaagggggaaggctggaagtattaaatgtgttgaagaaacattgaaaagaaatgatattctttttacacgatatgctttttgtaataaaggtggtttttttaaccagatgttaacggcagctccagaagataaaacgaaagcaaagggacttgtaccaataaaaaaaggtatggaaacatggaaatacgggggatatacatcagtaactccgtcacattttatgttggttgcttcgaaagataagaaaggaaaggagataagaacgattgagacagttccgttgtataggtggaaagagttcaaagaaaatccagatgcattactccaatattgtagagagttctatggtttgaaagagcccaaggtgttgataccatgcatcaagaagaatgccagattagtcgttaatggatttccaatgcatttgaaagggagtacaggaaaacaattgattttgcagggagcggttcaattatgtctgaataatgaaaatataaagtatttgaaaaaagtcacaaaatatttggaatataatgcacagagaagagataaaagaacactgctggaagtaagagaggttacaggaattaacaaagaggaaaatatacagttatatgatgtgtttgttgataaattgagtaacacaatatatcagtatcgtccggccaatccaaaggacaatcttataaaaggaagagagaagtttatagaattagggttggcagaacaatgtgttgtgttaggtgaagtattgcatttgttccaatgtaaaccactcacgtctgatttgactttgattggaggttcaccgaatacagggacaataaaaataacaaagacaattagtaattgtaatgttgtaaagttgttaagccaatctattgcaggtgttaaagtgagagaaattaatttgttaataatatga

SEQ ID NO: 52 - DNA, 3327 bp, Unknown
  Synthetic sequence or sequence of unknown origin
atgaaatataaattgggtttggatttgggcagcacttctttggggtgggccgcggtaaaattaaatgatgcaggtgcggtggaacaactgttggatttcggggtacgtattttccccgacggccgtgatgccaaaacacatgcgccaattaatgtggtgcggcgtgcggcgcgtaccatgcggcgtcgtggtgaccgtgtaaaactgcggaaaaagcgtgtgttgcagttaattcgaaaatacggtttggattttgatattcgttccaaccccattttggaaaatccgtatgaattgcgtgtccgggcactggaacatcgtttaagtccgtctgaactggggcgtgtgttgtttcatctggccctgcgccgtgggttcaaaagtaatcgcaaagaaaccaagggtgaaaacggcggtaagttaaaggcggccacagatgccttggcatcggcggtcggggacggtacgttggcccagttccaggttcagaccaaaaagttccgcttttccaatcagtttgacggaaatgttatcaaagacggggcactgtatcccacacgggatatgtatttggatgaattccatcgtatttgtgatgcccagggattggataaggaaatgcgggccgcatttgaaaacgctattttctttcagcggcccctgattcccccggtggttggtacatgtatttttgccgccgggcagccgcgtgcgcacaaatttgaacccgtgttccagcggtggcgtgcgttgcaacagttaaaccagttggcgattttggataatggacaaaacgtagccttgacggatcaacagcggcaatgtctggtggatattttgctgtataattttaacggggtaaagcgcgacaggggcggccgtgtaaaaattacgttcgcggaaataaaaaagcagctggggctgtcccgtacagtgaagtttaacctggaatcagaacagcgcaaggaattgaatgttgattcaactggtttcagttttgccgaaattggcgaactggatttttggcgttctttgaccgatgaacaacaatccgatgtattgaataaaatcaatgacgaccagacagaagatgccgaattgattgaatatttggtggcacattacggattgtctgcatcacgcgcgcgggcaataattgatatccccctggaagatgatgttgccaatgtgtccgtggtggcgatgaaaaaaatgctgccgtttttagaaggggggcaattatatcatctggcggtacattcggcggggtatcattatggcgaacaagatgtgccattaatggataaattaccgtactatggtgatttagatgtgttaaagccgtcattaatgcccgcgcgtgacggtgcataccggaccatgaatgcaacggttcacattgccatgaatcaaattcgggtggttgtaaacgatttgattgaacgttatggtcggccatgcgccattaacatagaattgggccgtgatgtgcgtgcgggtgccaaagaacgcgccgaattggacaaacagcaatctgccaacaaacgcaagaatgacgctattcgggcggaactggccgaaatcggcatattaaacccatcccgcgaagattttcaaaaatataagttatgggaaaatttggcgccccagccccagaaccgccggtgtgtctataccggcgaaccgattaccagtctggccgcgctgttcaaaagtgggcggtttgaaattgaacatatcttgccatttgcccagacattggatgattctttggcaaacaagaccatatctgccgttgccgctaaccggttcaaagggaaccgcagcccggccgaagcatttgacgatccggcatccccatgggcgtatgcagatgtttgggcgcgtgcccaaaatctgcccgatggcagtcgttggcgctttgaccgggatgccatggaaaaattcacacggcacggtgattgtattgcacgcgcattaaatgatacccgttttatgtctgtgatggcggttaactatttaaaacatatctgttcggataaaaacaaagtccgtggattgccggggcgtttgactgcgatttttcgtgatatgtggcacttggattggtggaaaaaccacgatgatgcggacacatatcgcgccagtcatatccatcatgccattgatgcgtttgtgattgcgtgtatgggggcggggaatttacaaaaactggccgaaaatgccacgcatctggaagattttcatggaaaaacactgaaagaaaaacatcgtcaattgtttgcggacatgtatctgccgttcccggaatttgattactatgattttcggatgcggtgcgaagcatgtgttatatcctatcgcccatctgtaaaagaaccggccgcatcggatactgttggatgtctgcacgaagatacggcgtataagttggaaaaattcgaaaccggaacgcgggcaacgatgtcacgccggattgccttgccaaccacggcggatgcgcgtgccaaatttaagaaggattttgattcgctgaaccccaaaacattggaaatgtttttggccgaaaccggggtggcaaacgatgcaaatgacatcgcagaccagttcttgaattggtgccagatgcgcggaattaaaaaagtgcgtatgtttaagacccgggtggatacgacgacttatgttccggtgtttcgcaatcgcggggataaaaatgcgtttaaccgtgcgtggaccgaatggtatgcggccgcgggtatcgcgcgggggatgacagaaccaaaggctaaaaaagcccagcaggaaaaggaaaggcgtttattggcgctgtatcaaaatgccgccgcccgtgcatacaagtggtttgtcagtggaaataatttttgtgcggatatattcgaaattcgttctgatgaccgacgctatcccgcattggccggccagtggcaatctgaaattatatccaattactgtgccacattgaataatggcacgcccatgtggcgttgcaaatatgcaacggcccggcgggtgatgcggctcagaatcaatgatatggtcatggcggaattttcgcgggataatgtgcctttgctcaaagggttggaagacgcggtgcgtcatcaattggccgtgcaagacacagatacagtaaatattattttcagggtaaagaaaatcagcagcaatggtgcaatatttttgcgaccgcattatattgccaaagaagatgctgatacaaaaacatggaaagccaatgcgacatctttgcaaaagtacaaggcccgaaaaatacgcgtcagcccaacaggaaaagttctagaataa

SEQ ID NO: 53 - DNA, 3327 bp, Unknown
  Synthetic sequence or sequence of unknown origin
atgaaatataaattgggtttggatttgggcagcacttctttggggtgggccgcggtaaaattaaatgatgcaggtgcggtggaacaactgttggatttcggggtacgtattttccccgacggccgtgatgccaaaacacatgcgccaattaatgtggtgcggcgtgcggcgcgtaccatgcggcgtcgtggtgaccgtgtaaaactgcggaaaaagcgtgtgttgcagttaattcgaaaatacggtttggattttgatattcgttccaaccccattttggaaaatccgtatgaattgcgtgtccgggcactggaacatcgtttaagtccgtctgaactggggcgtgtgttgtttcatctggccctgcgccgtgggttcaaaagtaatcgcaaagaaaccaagggtgaaaacggcggtaagttaaaggcggccacagatgccttggcatcggcggtcggggacggtacgttggcccagttccaggttcagaccaaaaagttccgcttttccaatcagtttgacggaaatgttatcaaagacggggcactgtatcccacacgggatatgtatttggatgaattccatcgtatttgtgatgcccagggattggataaggaaatgcgggccgcatttgaaaacgctattttctttcagcggcccctgattcccccggtggttggtacatgtatttttgccgccgggcagccgcgtgcgcacaaatttgaacccgtgttccagcggtggcgtgcgttgcaacagttaaaccagttggcgattttggataatggacaaaacgtagccttgacggatcaacagcggcaatgtctggtggatattttgctgtataattttaacggggtaaagcgcgacaggggcggccgtgtaaaaattacgttcgcggaaataaaaaagcagctggggctgtcccgtacagtgaagtttaacctggaatcagaacagcgcaaggaattgaatgttgattcaactggtttcagttttgccgaaattggcgaactggatttttggcgttctttgaccgatgaacaacaatccgatgtattgaataaaatcaatgacgaccagacagaagatgccgaattgattgaatatttggtggcacattacggattgtctgcatcacgcgcgcgggcaataattgatatccccctggaagatgatgttgccaatgtgtccgtggtggcgatgaaaaaaatgctgccgtttttagaaggggggcaattatatcatctggcggtacattcggcggggtatcattatggcgaacaagatgtgccattaatggataaattaccgtactatggtgatttagatgtgttaaagccgtcattaatgcccgcgcgtgacggtgcataccggaccatgaatgcaacggttcacattgccatgaatcaaattcgggtggttgtaaacgatttgattgaacgttatggtcggccatgcgccattaacatagaattgggccgtgatgtgcgtgcgggtgccaaagaacgcgccgaattggacaaacagcaatctgccaacaaacgcaagaatgacgctattcgggcggaactggccgaaatcggcatattaaacccatcccgcgaagattttcaaaaatataagttatgggaaaatttggcgccccagccccagaaccgccggtgtgtctataccggcgaaccgattaccagtctggccgcgctgttcaaaagtgggcggtttgaaattgaacatatcttgccatttgcccagacattggatgattctttggcaaacaagaccatatctgccgttgccgctaaccggttcaaagggaaccgcagcccggccgaagcatttgacgatccggcatccccatgggcgtatgcagatgtttgggcgcgtgcccaaaatctgcccgatggcagtcgttggcgctttgaccgggatgccatggaaaaattcacacggcacggtgattgtattgcacgcgcattaaatgatacccgttttatgtctgtgatggcggttaactatttaaaacatatctgttcggataaaaacaaagtccgtggattgccggggcgtttgactgcgatttttcgtgatatgtggcacttggattggtggaaaaaccacgatgatgcggacacatatcgcgccagtcatatccatcatgccattgatgcgtttgtgattgcgtgtatgggggcggggaatttacaaaaactggccgaaaatgccacgcatctggaagattttcatggaaaaacactgaaagaaaaacatcgtcaattgtttgcggacatgtatctgccgttcccggaatttgattactatgattttcggatgcggtgcgaagcatgtgttatatcctatcgcccatctgtaaaagaaccggccgcatcggatactgttggatgtctgcacgaagatacggcgtataagttggaaaaattcgaaaccggaacgcgggcaacgatgtcacgccggattgccttgccaaccacggcggatgcgcgtgccaaatttaagaaggattttgattcgctgaaccccaaaacattggaaatgtttttggccgaaaccggggtggcaaacgatgcaaatgacatcgcagaccagttcttgaattggtgccagatgcgcggaattaaaaaagtgcgtatgtttaagacccgggtggatacgacgacttatgttccggtgtttcgcaatcgcggggataaaaatgcgtttaaccgtgcgtggaccgaatggtatgcggccgcgggtatcgcgcgggggatgacagaaccaaaggctaaaaaagcccagcaggaaaaggaaaggcgtttattggcgctgtatcaaaatgccgccgcccgtgcatacaagtggtttgtcagtggaaataatttttgtgcggatatattcgaaattcgttctgatgaccgacgctatcccgcattggccggccagtggcaatctgaaattatatccaattactgtgccacattgaataatggcacgcccatgtggcgttgcaaatatgcaacggcccggcgggtgatgcggctcagaatcaatgatatggtcatggcggaattttcgcgggataatgtgcctttgctcaaagggttggaagacgcggtgcgtcatcaattggccgtgcaagacacagatacagtaaatattattttcagggtaaagaaaatcagcagcaatggtgcaatatttttgcgaccgcattatattgccaaagaagatgctgatccaaaaacatggcaagccaatgcgacatctttgcaaaagtacaaggcccgaaaaatacgcgtcagcccaacaggaaaagttctagaataa

SEQ ID NO: 54 - DNA, 4044 bp, Unknown
  Synthetic sequence or sequence of unknown origin
atgataaatcaggagtattttttgggcttggatatcggaacggattctgtgggctgggcagcagcaaactcggagtatcacattatcaaaaaaaatggaaaagcgttatggggcgtgcgattatttgatagtgcacagacagccgctgaaagacgtgagtaccgtatcgcacggcgccgtattgagcgcaggaagcagcgccttgcctggttgcaggaccaatttgcggcggaaattgcgaaaaaagatcctgcgttctttcggcgccttcaagagagtaagttcttagaagaggataagcaatctaatcatccgctgggccgctataccctttttgcggaccggaattactgtgacaaggattactacagggactatcccaccgtttatcatctccgaaaaaaactgatggaacagcctgggccgtttgatgttcgattggtataccttgcgctccatcatattatgaagtaccgcggccatttcctctatggcgatctagccatggattctatttctctcaaagccggaatggaccggctgaaccatgttttagagcaggagtttgagtataaacttgaggtctctaacatggaggcactgaaggaagtccttatttcccgcaaaggcagtaagacttggaggaagaagtgtcttgctgaactgctctctgtggaaaaacgagaagatcaaatgggcttcgcactggcagaattgttggcaggcagttccgtgcctttggatgcattatttggagatgggacagctacagaggattttaagaaaatttcgctagaggacgattttgaggagatagtaccaaaactggaagctgctctaggcgaccgaattgaggtggttcttgccgcaaagggaatccatgactgggcattgcttgagacaatgcgagacggagagcgttatatttccagtgcaaaggtcaagtcttaccagaaacatgaggatgacttgactctactgaaaaccgttgtacgccagcttaatgaccgagatatgtaccgggaaattttccacacggcccgggaaaagttgaacaattacccagcttattctggaaaggatgcgaatggttgcagatgtggctatgacgacttccgcaagtatttaacaggaaagttgaaaccgtacaaagatttatactcggatatccctgctattctttccgaacttgaacaaggaacatttctgcccttgcaaacaacgaaggataatggagtgatcccccatcaactccatgaagaggaattggtcaagatactgggaaatgcatccgcttatctgccgttcttgacgcaggttgatgagagcggcctaacaaaagcggaacagatccacaggatattctgcttccgaattccttactacgttggtccgctggatagcagatcggagcacagttgggtcgttcggaaaaatgacaaggtctatccctggaattttgagcaggtggttgacctggaagcgtgcaggcggaactttattgaacgcatgactcgcaaatgcagctacataggagaacctgttctgccacagaattcgttgctctatacccgcttccaggtgctcaatgagttgaataatctgaaagtgaatggtgaaggtatttctgtagcgcagaaacaggcaatctatcatgatttgtgcctaagcggtaaaaaagtttccctgtcaaaactccgaaactatttgaatttggataagaatgatgaaatcaccggcatcgacggtgatttgaaaggaacgctatccccatggaaacactatgcctggctgatcaaacagcctgggggatatgagatcaccgaggatatcatcaggcaaatcacattgtttggagatgaccgaaagctgcttgccaactggttgcacaagacctatggcaacaagctgacccgggaggaagaaaaattggcccttcgtttccaatgcagcggatggggacgtctttctcgtgctttcctgaccgagatctatcatggggagtcttctaccggtgaggctatgtccattatggacatgctgtgggagacaaattacaatttgatggaactgctcagcagccgatttgattttgccggtgcggtccaggcctatcgggaggcgcatttgaatcagtatatgtccctccaggactacctggacgaaagctacgcatcacccggaattaagcgcgctatccatcaggtcatggggatcgtcaacgaattggaaggtatcctgaagtgcccgccgaaacgggtttttgtggaggtggcgcgagagcatggggaaaagggcaagcgcaccatttcccgtaaaaatgaactgctggcactgtatcagaagtgcggtgaagagtgtgatgagttattccaacagctttcggacgaaccggaaggaagtcttcgcagagataagctgtatctgtactacacgcaaaaaggcaggtgtatgtatagcggagagccgatcaatttaagtgaactggacagtggatacgacatcgaccatatttatccccagagcaaaacaaaggatgacagcatccagaaccgtgtcctggtcaaacgggagctgaacgccgtgaagtccgacaattaccccatcgccgctgatatccgaatgaaaatgcgtcctttctggacgaagctggagcgggctgggctcatatcaaaagaaaaatatcaccggctaactcgcagtacggaattcagcgcggaggaacaggctgggttcatcagccgccagttggtggaaacccgccagtccagcaaaatcgtggcagaacttctgaaacagcgctttgggtcacatacggagatcgtctatgtgaaagcagggaatgtctcctctttccgtcaggatcagcggctgacaaaggacggacagcagaaacaggcggggcaatgtaaacaaaatgagcaaactgtgcaagacccgttgtttgtcaaatgcagggaggtcaacgacttccatcacgctaaggacgcctatctcaatattgtggtgggcaatgtctatcacgtcaaatttacccgcaatccggccaatttcctgcgagagaaaaatgccaagtttagtttaagccgaatgtttgacttcgatgtatcccgaggcgaagacgtcgcctggagggcaggcccagagggcagtatagccattgtccgccataccatgaggaagaacaatatcctctttaccaggcgttccgcagaggccacaggaggacttttcgaccagatgatcgtccccaaaggaaaaggacaggcccccgtgaaagccagcgatcccaggatgagcattgagaaatttggaggatacaataagttgaccggggcctatttcattcttgtggagcacaccgccaaaaagaaacgggtacgctctctggagactgtgcttcttatgtataaagaaaagtatgaagctgccccagaaacatactgctgcgaaatattgggcctacaggaacccaaggtgttgattccccgcattaagatcaataccctggtgtcctatgatgggttccggatgcatatttccgggcggactggtgacaggattatatacaaaaacgcgaatcagttagttatgccaccagattggcagcagtatattaaaaacatatccaaataccttgagcgttgccggacggctggccgggaactggagttgaccacctttgatggcattaccgatgaagcgaatttgacactctacagattgttgctggaaaaattagagaatgggagataccgggtaaagtatgaaacgccggcacagaccctttgttcgtgcagcgaaaagttccggcggctctcggttccagatcaatgcagaatcctaatgcagatcctcaacttatttgcgaacactgccgccagcgcagatcttaaactgttgaatggcaaagcgggaattggtattttgctcacctcgaaaaatcttgataactataggggacattcttttaaattgatccaccagtctatcaccggtttttttgaacaggagatagacttgatgggagagatgctttcatga

SEQ ID NO: 55 - DNA, 3990 bp, Unknown
  Synthetic sequence or sequence of unknown origin
atgaaaaattattacgttggtattgatatgggtactaactcggtaggttgggctgctaccgattgcgagtaccatttgcttaaagccagaggacaagatttgtggggaagttacttgtttgatgaagccgagggcgcccaaaaaaggcgttcgtttcgaactgctcgcaggcgcacggctcgcacacgtcaacgtcttttgcttttgcaaagtttgtttcaggaagaaatggcaaagaaagacccgctgtttttcatcaggctaaacaacagtcctcttgttttgaaagacaaaaacgaaagtctgaaaacatccgacagtctttttgccgaccaatctttcacggacaaaaactatttcaaaaaatatcctacaatctaccatctacgggcatcgttgataaatgacaaaataacggatgtgcgtttgttgtaccttgccgttcaccacattattaaaaatcggggacattttttgtttgaatcccaaaatttcaatgttgcaaacgaagaagttgtcaaagacaaattttttgccataaatgcttttctgagcgatcgtgaaatgccgacattaaatttggaaaggctgcacgaagttttgcaagtcctcaagcagacaaaaagttccaaaagagataagcaaaaaactcttggcgagttgttgggcgtttccaaagagaaacctctaacgtcaatagtcaaagcattgattggcggcaccgtcagtttgaaagacctgtattcggcggaaagtgattttgacgacataaaatctttttgtttcgacaaggcttcttttgaagatttggatttgcctgccataaaaagtgccgttggcgaagacgatgcagagttggtgcttttgctgaaatcggtgtacgattggacggttttgtgcggaataatgggggatgaagagtacatttcctttgccaaagtcaaaatttacaacaagcacaaatccgatttggtttggcttaaaaactacgttcgccaaaatttttcaaaagaaacgtacaacgaggtgtttcgtcgaaaagacaagaaaaacaactacgcagcctacataggcatggacaagcaaaaaggcttttccaaatgcaaacaggaagatttctacgcttttttgaaaaaacgactcaacattacagatgaaacagtgttggcagaaatggacaagggacagtttttgccaaaacaagttatcaaaacaaacggagttgttccctatcagttgcatttgctggaattgaaggcaattttgcgcaacgcacaaaagtacttttctttcctttccgaaaagcaggaaggtgttacggttgcggaaaagatagtttctctgatgaccttccgcataccttactatgtcggaccgctcaacaccgcaagcaaaaagtatgcatgggctgtgcgtcgccccggatacgaaaacgtcagcattactccgtggaattttcatcaaatagtggacggcgatgcatctgaagaacaattcatccgacgcatgaccaacaaatgcacctatcttgtcgggcaggacgttttgccggcaaattcccttttgtacagtgagtatgtttttctcaacgaactcaacaacctgcgcataaacggagaaaaaaacaacaaagcaagacaactaattttccattacgccaaacagcacaaaagagttacgcttaaaaactgccttgccttgcttgttcgcaacgggcttttgcccgccgacagcagcatggacgttttcagcggattggacggagatttcaaaacatccctttccacctggtacgatttccgtttccttggcgacaggttgcaaactcaacgtgaaatgtgcgaacagattatcttgtggataacgcttatttccgacaaaaaccgattggaaaagcgtattcgtacggcttacggacagtatctttccgatgaagagataaaacgcatcaaagggttcaactattccaagtggggcagactttcaaaaatactgctggacggcattgtcagcgaacgctgtttcgacgaaaacggcgaattgctcacaataatagaggcaatgcgccaaaaaggcgaaaacttcatgcagttgctttcggacaaatacggctttcaggacgctatcgaaagatacaatcaagaaaactctccgtccgacgacaaagtttcctatcaaacggtggaagacctgtattgttccccctccgtcaaaagggcaatatggcgcacggtggaaattgtcagggaaatagttaaaattcagggctgtgcaccgcaaaaactgtttttggaaacagcccgtgaaacaaaggacaacggcaaggcaggcaagcgcaccgtttcacgcaaacagcaacttttggatttgtacaaagacattcatttgcaacagcacgattggataaaggaaatagaatctcttcccgattccaagttcaacagcgacagattggtgttgtactaccgtcagttgggacgcagcatgtattcgggcaagcccatcaagttggaagaggttttcgaccgcaatatttgcgatatagaccacatttatccgcaatccaaaataaaagacgacagtttggacaacagagtgttggtttacaagaacgaaaacagcgtcaaaagcgacaaatacccgatttcctccgaggtacgcaacgcaatgcgtcctttttggcagtctttgtgggttcaggggttgataagcgaaagaaagtatcaacggctgataaggtctacgccgttgactgtcgacgaacttgccgatttcatcaaccgtcaacttgtcatcactcgtcaaagcacaaaagctacggcacaaattttgaaacaaatattgcctgacacggaaattgtgtacaccaaagcggcaaatgccaacgaatttaaggacaaaaacaatctgttgaaagtgcgtgaactcaacgatttgcatcatgccaaagacgcctacataaacattgtcgtcggcaacgtctacaacacaaagttcaatcacaatgcggcagtattcttccgcaacaattcaatagacagttacaacttcaacaaactgtacgaaagcgacattcccggggcgtggcgtgttgcgcaaaaagccgatgttttggcgactttccaaaaaaacacctgcaaagtcgtgcgtatgactgtaaacggccacggcgccttgtttgacgtaaaccctgtggttgcaggtaaaaacgccgaccttgtccctctcaaaaagcacggagcaattgccgacacttcacgttacggcggatacaattcggcaaaaatcgtctatttcgtgttggtacgcagcgacggcaaagcgggaaaacaactgctttctttggaaccgtggcccctgtggatggaaaaacagacgggaggcagcaccgaggcgaaactgaattacttttctcaaaaactgacaaatccgaaaatatgtatcgaccgcattaagcagaacactttgctgtgcgtaaacggctcttatgcctggcttaagggcaaaacgaataacaatgttagtttgtgtaacgccaatcagttgtttttggacggcgaaaacgttcaaacgctcaaacttatcagcaactacatgagggacaaaaaaacattcaacaatccccaaatgcccgccaacgaaaaaataactgccgaaaacaatcttcgtttgtatgatgcgttggtgcagaaactaagttcgtccctgtacgcaggtcttgcaatttgcgggcaagttccgttcttgcaggaaaaacgtcctgtttttgcctctctttccgtggaaaagcagtgttgcgttttgtgggaagtacttcgtcttatgcaatgcaacgtcggctcttccgattttacgttattgggcggtgtcgcaaatgcaggcaaaataacgctgaacaaatttattcaagatgaaaacataaaattgattttccaatctcccacaggctactatcgcactgttgtggatgttggcaggtttctgaaatga

SEQ ID NO: 56 - DNA, 4092 bp, Unknown
  Synthetic sequence or sequence of unknown origin
atgaaaaagacaagggaagattattattggggggttgatattggaacaaattctgtaggctgggccgtaactgacgaaaattaccgcctggttcgattcaacggaaaaacaatgtggggaagccgattatttgatgaagcacagacagctgaaaaacgtcgccttagccgtactctccgtagaagactacagagacgaagatggagaattgaacttttgcaagaacttttttcggaggagatttgtaaggttgatcctggtttctttcaaagactgaaagatagcacatttcttccagaggacaaacagtctcaccagacaaataccctattttatgatacaaattatactgatgtagaatttcatcgtgagtatccaacaatctatcatttgagaaaagaattgattcaaaatgtggaaaagaaagatatacgacttatttatcttgctgcacatcacatattaaaacatcggggacactttttattttcaggcactattgaaaatgcaacttcatttgaatgcgcttttgataaaatgtcacaatgtataagagatgaatttgaaattgagctaaattgtaatatcaaaatggaccagggtaaaatggatgatttgaaaaaaataattcaagacaagaaattatcaaaacgagataaagcttctcagttcttagaatacttgcaatatgacgataaagagaagcaaaaacaaataaaagcgattgtttctttgatctgtggctccaaatgtaaattagcagatattttttctgatgagacattaaaagatgcagaacgctctagtatatcattttcagaaagttcttttgatgaaattcgcccagaactggaagatctcctacaagagagatgcggagtactggacatattaaaaggggtatatgattggagcatccttgcagatatcttaaaggggggagaacataacggaaactcctatctttctttggctaaggtacatatttataaaaaacatcagaaagatttatttgaattaaagaaactaattcgtacttatgccgatgatcaatatcaaagtttttttcaaaaagcggatagttcttcatcaaaaaattattgcaattatattgggagcacacgaagaaatggaaaaaggcattccgtaaaaaaatgcacttatgaggaattgacaaaaacgattaaaaatatttttacaaatatccaacaccctgatgcacagaataggattgaaaaaataaaaatggaattggatgcaggaacttatttgccattacaagtatcaaaggacaatagtgttattccctaccaagttcatgatatagagctaaagaaaattttagaaaacgcaaaaaagcactatacttttttaaataaaaaagatgagcagggaataactatttcagaaaagattattcaattatttgaatttcggattccctattatgtaggaccacttaatacttcggttggtacaaatagctggatggtacgtaaaaaagacggccccatacgaccatggaattttgacgaaatcgtagatgaaaatcagtccgcggaaaaatttattcgacgaatgacaaataaatgtacctacttgattggaaaagatgtattacccaaacactcacttttatattcagagtttatggtttggaacgaactgaataatctcaaaatcaagaatgaacctttgcctgtggaaacaaagattaagttatttactgacctattccagaatcaaaaacaagtgaccccaaagaagattctggaatttctaaaatgtgagggatatcgtgtagaacaaaaagatatttctggaattgatcaacggtttaaaagttctcttggctcatatctagagatgaaaaagatatttggagatgaaatacggaaacaatctatgagggaaatagcagaagaccttattctttggatcaccctgtatggagaagcgcccaagatgctaaaaaagataattcgttccaaatatgaaacaaagcagatcagtgataaacaaatggaacgaatatgtaaactgaaataccagggttgggggcgattgtccaaagaattcttagatggtttggaaggaacttctacaaaaactggcgaagtattcagtattataagtgcacttcgcaatacgaacgacaatttgatgcagctgttaagttcaaactacacttttgtagaggaaatagaaaagcttaattataaacttacccctgagttaacaaatttctcatatgaaactattatggcagatctggtagcttcccctgcgattaaacgagcagcatggcaggttcttttgatcgcagaagaagtaaaaaaaattatgggtaggcagccaaaaaagatttttattgaaatggcaagaggaccaaaagaaaaaagaccaacagattctcgacaaaagaagttattacaactctatgcaaaaataaaagatgagagcagagactggaaaaaggaactggaagatcgacaggagagtgagtttcgcagcattaaattatatttatactatacgcaaatgggaaaatgtatgtattctggggaacccattgatctatcccgcctcgctgacacatcagtatatgaccgggaccacatatacccacagtccaaaacaaaagatgatagtatagataatctggttctggtcaaacgggatattaacttgaaaaaaagtaatcatatgttatccccggctattcaggaaaaaatgcaagaattctggcattacttagaagatcaagggttaatttccaaagaaaaatatcgccgcctgactcgtaaatctccgttaactgatgaagaattggcaggatttatcaatcgtcaattagttgaaacccgtcaatcttcaaaagtggtagccgaattgtttcagcgcctttacaatgattcggatgtcgtatatgtaaaagcaaaggctgtttctgattttagaaatgagatattaaaagtaaaaaaatgccgctccttaaacgactatcatcatgcaaaggatgcctatttaaatattgtggttggaaatgtatatcatgaaaagtttactaataatcccttacattggcttaaaaagcatccatctgaaaaggaaaaatataacttaaatcagatgtttaatcatgatgtaataaagaaacaggtgatctggaaatgcggtgaaaagggatcacttaaaatggtccgaaaacagttaaaacttcgcgatatccgctatacacgattggcaacagaaaataaatgcgggcaaaacggcggctttttcgattcccagatcgtaagcaagacagcaaatgcctccgttcctataaaaaaaggaatggatgtaaccaaatacggtggatataagaccataacacctgcttactttgcccttgtcacctcagaagacaaaaagggaaatatccaaaaaagtattgaagcggttcccctttacctaaaggaagcaattgaaaaggacataaatatatttattgattattgcaaagacacttataaactaaaaaatccaagtattttattaccaaaaataaaaaaggatactctatttgtagtaaacggatttccaatgcacttgagagggcgtagcaataataagttagtattacaatgtggagtacaattatttcttgaatcgaaatatgaaatttacctaaaaaacattgagaaatatctacttcgcagccaaagttttcacggtaaagaactgttgccaatcacagagaatgatggcatcacttccatggaaaaccttgagatgtacgatgagttgtatcgaaaacaaagggataccatttatcaacatcgaccagccagccagttggaaacattaaaaaagggccgcgacatatttacacagttaccctgtgaaaaacaatgttatgtattaaatgaaatcatgaatttaatgcgttgcaaaccaataacagcaaatttgaaagaaatacagggaagccctcatgcaggaagcattagtataaataaagtaattaacagatattttcaatgtcaaataatttatcaatctgttacaggactatttgagcaggaaattgacctgctgtccctatga

SEQ ID NO: 57 - DNA, 4512 bp, Unknown
  Synthetic sequence or sequence of unknown origin
atgagcaagacaatattaggactcgatttaggatcgaacagcataggctgggccgtggtgaaagccgaggtgagtgagagtggcgaggagaggctcacgggcatagaggccgcgggcagccgcatcctgcctatggacgcaaaactcttgagcaaatttgaaaaaggcaacagcgtgtctcagaccgagacgaggcgcaaggcacgctcagcccggcgccggagcgagcggaagaagctgcgccgcgcgcgcctgcttcgcacactccgcatcattggctggctacccgcccacatggcgagcgccattgacgactatggcaacataaagcgcggtagcgagccgaagatggagtgggacggtggcaacttcatgttcaccagggcgttcgaggagatgtgcgccgagttttccgcacgtcacccggagctcaaatcggtgtcgcacgactggactgtatattacctgcgcaagaaggcgctgcgcgaggccctgacaggtcaggagctggcgtgggtgctattacatttcaaccagaagagggggtacatgccgtcgcgcaccgacgccaacatccccgccgccaaagagggggagaaaaaggagatagtggacgtgcgcgtcgtaggctgcaaggccgccgaggccgccaaggggcgcaaggcgacaaaagccgtgacactgatttttgacgacgggggcgaaatgaacatgccgtattacggcaccacgcccgaagagatggtggggcggcaaatggagctgctgaagacgacaaaggagggcaagacgccgacctacaccaacccgggcgagaacgactggacatttaagaaagagaagagcaaagagaggataaccagcgcgcacaagaccgttggcgagtacctgtatgacagcctgctggaggagccggacgtgaaactggcaggcggcaaagtgaccgtcttggaccgcgagctgtataagagcgagctggaggccatcctgaccaagcaagccgagtttcacgatgagctgaagtctcccacactgttggccaagtgcgccgaggctctctaccccaacaacccggggcaccgcgccgagctgatgcgccacacaatggcgaacctgatcatgaacgacataatactctatcagcggccactaaaaagcaagaagtccaccattgccgactgcccgttcgaatatcggacatatatggacaagacgggggtcgagcaagtgcagaagctgaagtgcgccccccgctcccaccccctgttccaagagttcaggctgtggcaattcgtgaccaacctgcgagtgacggacgagcagacaggcaacagcgaagacatactgacagacgccgaccgcatgaaacttttcgacgcgctgaccccaaaaagcaaggtcaaagccgccgacgtgctgaaaatcgtgcagaaaataataaaacccgaggagtccaaaaaagagaaaggcgcagccccggagtgccactaccgcgtgaacatggtcgagggtaaggactacccgtgctacgacatgcgcgccgagatagccgcctgcctcacgaacaagaagtcggggcccgggctgaaagcgggcgacgcgtatgagctgataacgcagacgcgcgaggagggcgacatgaccaacgaggagtacttgtggcacatatcatactccgtgaccgacccgaaggagtttgagaaagcgataaagaagtgggccgagaccaacgggctgcccgccgaagagaccgcgagagccttttgcgcgctcaaacccaataagaactatgcgagctattcactcaaggccatcaagcggctgctgccgctcatgcgcatgggcaggcactggagctttgaggccatcgacgccaagacgcgcgccaagattgagcacttcataaacggcgaggaggcggaggacatgaccccggagaccatgcacaagtgggcagccgacaaagaagacggaggctacgacctcaaacaagccgaggaatctttccaaggcttgcagccctggaaggcttgtatggtggtttatggcaagctgtcgggcgacgaggggctgaagtggcagacggcagacgacgtgagggagtggcttgacaaattcccccacggctcgctgcgcaacccgattgtggagcaggtggtgctggagaccatgagagtggtggccgatgtttgggacaagcacggcaggccggacgagatacacatagagatggcgcgcgagctgaagaagaccaacgctgagagggctgagatgacgaggcaaaacgcacagagagaggaggataacgagcgcataaggaagattctgcgtgagctggcctccacatgcgaggacgtaaaacccttctcgcccattcagcaggcaagactgaagatatgcgtggagggtgcaagattagtcgcacccgcggaagagcccaagatagaggagatagagaaatacaaactctggattaagcagaactacaagtcgccatacacgggagagagtatagagctggcccgcttattcacatcggactacgagattgagcacataatcccccgctcgcgctattacgacgactcgttcaacaacaaggtgatatgcgaggccaaagtgaaccaggacaaggacaacaagatggccatggagtacataaacgccgcccagggcaaagaagtagatctcggcggcggaaggaaagtgaatattcttacgccagacgaatatgtaaagcgcataaacgacatatacaaaaacaacagccgcaagcgcgagaacctgctccgcacagagctgccgcaagacttcaacaaccgccagatgaacgactcgcgctacatagccgtcaaagtcaaggagctgctgaacaacgcggtgcgtgccgaggtgggcgatgatggcgccgggtcgaagaatgtggtggtatgcacgggtacagtgaccgaccgcctgaagcaggattggggtgtgaacgacaaatggaacgagataatattgccgcgcttcatggcaatgaacgagaaagttgcggacaaaagcgaccgcaacaaccgctttattgccaaaagcaacggccacctgatacccacagtacctaccgacatgctcaagggcttcaacaagaagaggatagaccacaggcaccacgccatggacgccatagtgatagcctgcgcaagccgcgccatggtgcaattcttctcaaaccagtcgtccaacaagggcggcaacatgtttgagaacctcaggaagtcactctgccataaggacgcaaacaacgtgtgggtggtcaacatgccgtgggagacgttccccaccgacgtcaagaacgcgctcgagagcataactgtcagcatcaagcaccgccagcgcatagtgacacgcactacgaaccactacaccgtcaccaagggcggcagacgcgaggttcgcaagcaagcgacctacgccatccgcaattctctgcatcaagaaaccgtgtggggactggtcaacctccagcagaaggagcagatgagcctcaaggacgcgataaaggagctccgcacattcctctcggcgaggattgacgacccgcagatgcgccccaagtcccagattgtatgcaaacccctgcgccgccgcatctcgcaactgataacggctggcaagaccgacaaggagattctcgctctgctggatgcggagtccgacgtatggagcgaggagataaagagcggaaaagtgagcgtgtacacctggagcaaggatggcggcaccaggatatgcgccacccgtttcttaagcagcctgtcagacctctttagcaaactgacagacgaggagaagataaaaaacaaaatagcctcaataacagacaccggcattcagaaaatcctgttcaaccaccttgctcagtggcaaggcggagccgccaccgcatttagcccagacggcatcaagtggatgaacgagaacatccagacgctgaacggcggcaagcctcacaagcccatatataaggtgcggcgcacggagacatctgatgcaaaacagcaaataggcacgaacggaaacagaagcagcaagtatgtcgaagcggccaaaggaacaaaccttttttttgccgtctatgttgacgacaaaggcaaacgcacgttctccacgacaccactgcgaacggtcatcagcaggcagcttcagggacagtcccctgtccctgagaccatcggcgacaacgaaagattatgtttctacctatctcctaatgacttagtgtatgtgccgacgcatggagaacgttacatagaagacagaaataggatatataagtttgtctcctgttttgagaacagggcttggtttattcctgcttatgttgctaaggtcattgtagacaagagtgagttcggcagccaaaacaagatcgaagtcatagacggcgtctcgatcaagaacgtctgcctccccgtcgaggtagaccgcctcggcaacgtgacactcaaaaagataggcgaggatgattaa

SEQ ID NO: 58 - DNA, 4395 bp, Unknown
  Synthetic sequence or sequence of unknown origin
atgaagaaatactttttagggttagatgttggaacagaaaacattggttacgcacttactaaagattatgaagttatgcaagtaaatgggaagcgcaccatgggtgtactatcttttgaatctgcaaatactgcagtggataggcgtacatatagggcgacaaggcgtagattggataggcgccgttatcgtattgcgttacttcaagaactgtttaatgatgaaattatggctaatgataaaaattttctaaggagacttggggataatgatttgtaccttgtggacagaaatgtcgaaggtaaatattctttattcaatgatactgattttaatgatatagcgtattataagcaatatccaacaatatatcatttgcgtgaaaaacttatgatggaaggtacagatgatatccgattgttgtatctagcaattcaccatattattaagtacagagggcattttttacttgctggggaagtttccacaaatgaagtcggtggcgtaaaacaattggaagaattgattaataaattaaatagtaaactagatgaaaataatgatgaaaataagaataatgatactacttgtttttttgacaagtttgcaacaacggctttgagtgatgtgaaagatttgatttgtggcactggcgacattacaaaaaatatgctaaatcaaattacaataggcaaaaaatacatttcaaagagagataaaaaaaataagcttaatgaattgtttggtgtttcttctagtaaaacatcaaaaaaaattatagatattgtaatgggtggtaaagttaatttaacagagttgtttggcaaagagtactatgaaaaagaagaagtcaagggttttacaatggcagaagagtgggagtcaattgaagatttgcaattgattaaagataatattttgcatattgatattattgatacaatcaaacaaatttatgattgggtaacacttaatgaaatgcttaaaggtaaacaatctttgtcaagtgcaatggttgaaatttatgaaacgcataagcaagatttgcacgatttgaaagaatttataaaagattatgctccaaatgattatgagagagtttttggagaaataaaaaatgaaaaaggtaaaatagataatagtatttgcaactatagctgttacataggtggtggcaggtataatggggataagattggtgcaaacggcaggtatggaagtacttgtacacaagaagatttctataaatttataaaaaagattattgaaagcgttacagttgaggaagcaactgctttacgggatgacttgcttgaaagaatagctaataaggattttatgccaaaaattgtttcaaaaaacaattctactataccatatcaactaaatatgatggaacttgatgggattttagataaggcaagacaaaatccaaaatttacttttttgaatgatgtagataatggttggactattgctgataaaataaaatcacttttatcattcagagtgccatattatgtgggaccagtgaaggaatatgaagataatgataacaacaaaaggtatgcttgggctgtaaggaaagagtccggcagaattactccttggaattttgatgataagattgacaaaaaacaaagtaatgagatatttattagaaggatgacaaatagatgcacctatttgaaacttgctgataccttgcctaaaaattctattttgttttcaaaatttatgtgtttaaatgaaattaattctatgaagataaatggtgatgctatttcttgtaaagagaagaaagcaatttttgacaatgtattttgcaagaaaaatccaacaattaaaaatatcaaaaagtatttgatagaaaattttggatatgaaaaaggtatagtcttgagtggtattgataatgaaatcaaatcaagtatgaaaacctatattatatacaaaaataagcttggtaataaggttgatgcagatcctaatatgattgaaagaattatttttttgtcaacaattcatgaggatagccaaatgttggaaaaatcgattcgtgaagaatttggtgataaattgactgaagatgaaatcaaggctattaaaggtttcaagtttaatggttggggtagtttgtcagcagagtttttgacaggatataaaaataatggcatcaaattaatgtttgatggagaaatgcttgatattattgatataatgtatgagtacaacttgaatttgcaacaaattattttcaatgaaaagtgcaatttttcagaagcattagaggcatataatttagaacataacattgtagaggactcaaatgtaagttataataaagacatcgcggattatccttgttctccatctgtcaaaaagtgtgtttggcaatcatttaaactggtcaaggatattgtgaaacaaactaaaattgtgcctgatgtagtatttattgaatcttgccgtgaaaataatgattttaagaaaaatcaaagaacaagcaaaaggcgtgatatgattgttgcaatttatgatgaagcacgcaagaaaattaatgaattacaaagggataaaaaggcagaattctcaattcaagagcttgaaggacttagtgaagatattgattattgccaaaagactctagataattattctgatagcgaattgaaaaaagaaaatttatatttgtactttatgcaacttggaaaagatatgtacactggcaaagctattgatttgaatcaagttttgtttggcaatatgtatgaccatgatcatattatacctaaggcagtgattaaagatgatagttttacaaacttagttttggttgctaaaaaagaaaacgctgagaagttaagaacttatccactcgaatctcaatttagacaaacaactttgtggaaaaaactatacaaaattgggttgctaagtaatgaaaaatattcaagacttatccgtcagacaccaattactgatgaagaacaagaaaagtttattaataggcaattggttgaaacgagtcaaactgttgtattattaagggatttgttgaacagatattttgctggcaaaaatgttgaagtggtgttgtcaaaagcaggtaatgtatctatgtttagaaaagaatttgatttaacaaaatcaagagaagttaatgattttcaccatgcttgggatgcatatttaaatattattgttggaaatattttgaataaagagtttaatcataattggttcattaggcaagataatggaaaagataagtcatataacttcttgcgtgtactaagaaaacaagcaactgcgaataacaatgaaatactgaatattattgagaaaacaatgaataatatcgattttcaaatggttaaattgccagaagagaaaaaaggcaacttctattcagaagtgttaaaaactcatgaaaatgataaagatagcagtttaataccaatgtgcgatagcaaaattgtgggtggcaaagagattcatcctaaatgcgatacaactaagtatggtggttacaaaactgcaaatactgcatattttattcttgcggattcgattgataaaaaaggtgcagttcaaagaaatattgttgctatatctatttttgatgatgcgagaattaaaaatggtaaaataacttacaaagaaatttttgaaagaattggcttaaaggatggtaaactcgcaaatgttgagggaatgaaagtgcctatcataaaaacgggttctttgttagattttggtgcttattgcttgagattagcaggaatgacagggaatcggttaacttttcataatgcaaatcaattatttgttagtaaagatcaaaataggtatatcaaagaattgggcatattggttgacaaagttgttaaggaaagcaaaaaggatactaaggaagataagaaagaggcaatggcactagaaattattgaagaaagtattagacgaaaaaataatcctgacaataaaaattccaacataattgtagtcaataggaaagataatttgaaattgtatgatttctttgtgtataaattgtcacataatccatataaagatatacctacatatagcagtttgcttgatattttgcaaagaggaaaagaagactttgaacaaaaggagatttatgctcaagtactcctattatttaatataatcaaagctttccaatgtaatgcacaaaaagttgatgttagtgctttatcttatgttaacaagaaaggtattgctacaaaaggtgggactggacaatgcagtattgcaataaatagtgatattactgaaattgacaaattgattttgattaatcagtctatgtctggactaaaagaacaaagaatacagcttaatttgaaaaaggtggacaaatga

SEQ ID NO: 59 - DNA, 3447 bp, Unknown
  Synthetic sequence or sequence of unknown origin
atggcattgcgttatattttaggtatagatttagggattagctccattggaacagcactttttaagattttaccagatgcaacagatttaaatgatattcattcatttgagaaaattttagatgcaggtgtgcggatttgtcctgtttcagagggagcagccaatcgccggaattttcgcagtcagcgcaatgctaaaaaacatagaaaagcccggaaaaaggctctcattgccttattgcaggagtataaacttttgccattggacaggtcagaactggaactgggcttgcgttcacagccatacgccttgcgggcaaaagccatgcaggagccgctcagcaatgcgtatgaactgggctattgcattatgaatattgcaaaactgcgtggagcaggttttattgacgaagcggaagaaaatgaggacgaaaaaaagaaaagcaaaaccgcaaaccgttatcaaattcttgagcaggagctgaaaacgaagaacattacgctttctgaatttttggcggatcatttggcgaaaaataactgcgttcgccagcgtttggattttatagcggagaaagtacctttttctgtgcctcgctatcttgtcaagcgggattattatgcccttatggaaaaacaggcaaagcattttggcatatctgacgcacaggtaaaagccatttattccacgatttttcaggattttccaaaagctccctatgccaatgctccgtgttcgcttttgccggagacaggcagcagactgccaaaaatgcacagacttgcggaagaattacgaatttatcagcaatgcaataatatccgctataacacagttgaacatactgacatttatcagggattaacaagacaaatgcgggatgctcttgcggaaaagctcatgcagggtgaagggcttaataaaacaagtattaaaaagatacttcaaactttttgcaaagaaaaaattaaaagcattaattgttatgcccaggatgaagaaatcaccgcgattaagccttttgctcatgtgaaagcttttgcgggtatccccactttttggaaactgccgcagcaaaaacaggatgaactgattgaatttatcgctgatccgctggatgtcaaggcaaagtcagcgaagcctgttttatatgatgaagaaaaatttttgcagatttgtatggaaaaattacagctttccggacttgaaggcgaacaaaaactgtacgctgctttgaatttgctgcccaaagacagaaccatgcttggcaaggaggcgagcaagcaaattttacaaaagcttgttgatggcattgaagttgacggggaatggaaagcccccacttattatgatgcggttactgcctgcaattttacgagggcaagtgccgagcaaaaagaatatgatttcttgccttattatggggaagttttggtcaatgatattttgcccattcatccctggcatctggaacgcactgcagaagaagaaaaaattggacgaattgcgaatcctgttgtgcattccatgctcaatcaactgcgcaaggtagtcaatgaaataattgccttgtatggcaagccggaaatgataaaactggaaattgcccgtgattttggtttgtcaaaaattaagcgtgataaattagaaaaacagcgtcaggctaatgaaaagtacaatcgtaccattgatgcggagttattgcgttttggttatgcttcaacgccaaaaaatcgtttgaaatatcgcttgtggaaagaacaaaacggcaaagatatttattcccggcaagaatttaaaattgcagattttaatcgctatcaaattgaccatattattcctcaggaagcaggcggtacaaattcgttctgtaacttggtattgacggataaaaataatgtcaaaggaaatacctttgcctatgattttattcaggcgaagtttcctgactgctgggaatccataaaaaaagagatggaagaaatgcctaaacacaaagcatggcgtttcacggctgaagcaaaaacacgttatgccctgtatggtgacgaaacagacgaagactatgcagaccgtcgtttgcaggatacacgctatatggcaaaggcggcacttcgttatctttcctgtatttgcaaaaatattttggcaattcgcggcggcatgacggcacagctgcggcatttatggggttttgacggcattgaatatgaactcatgggcttgaatgtgccaaaggaaagaatagatacggaaacaggggaagtttctgtcgacagtaacggtgatgcggcgattaatcctgattgggaggcaaaaccccgtattgaccaccgtcaccatgctgtggatgccatggtgctttgtgcgattacgcgttctttggctcaaaaaatgtacagggcagataatcgtaataaaaaaattgatgagtccatagcagacatgccctttagaaaatctcctaaaaattcagagttgaaatcttttagagaacttgtgcttgaaatgctgaaaacgattaaaatttcccataagccggaacacgacaccaatacgcagctgcataatgaaacagctattcgcattcttgattatgatgaaaaagatcagctttatattgcaaattatatgcgttcgctcagtaatattgatagtttcagtaaattagaaactattgctgttgctgaaaatttaggcaccagtccaacggtgcggaaaatgcgggagcgctgtgcccatattattaacgatgtgagtgctcagcgttttgccgcagaaaaaagtctcaagcaaaaaaataccgataatgctgcacagggattaaaagaggtaaaaattactgatcaagctcttgtgcaggaggcaatacgccttgcaaaggtggggaacaaatatcctcgccttgaaaagttcacccttgtaaatatccgcaaaaaacagcaatgcgggtatgagccggccagcaatcaccgcgtggatttctttgtgtatacagacggtaaaaagaaagatgaaattggctgggaatgtataaaaagcattgatgccgccaatcctaattttaagccaaaatggcaggaatatggagaacttgtttggagtgtatgtaaaggcgacattctggaactgcactttgataaagagacattgctaaaagaaaaaattcctatggcgtttgtaaggcaaaatgagcagcaagaatattgtatgcttgcaaaagtgttaaaatttacagctacatatattgtctttgtttcagcttttgatgcacgagctgatcaaaaaaatgctttgaaggaaaatccggaaccatttatgcgctggaaaagcggtaactgcggattatctttttactgcaaagcaaaggctcgtaaagtgcttcttagtccttttggaaaggtaaacaagaaattgcaaagattatggcatggcaagaaagtataa

SEQ ID NO: 60 - DNA, 3447 bp, Unknown
  Synthetic sequence or sequence of unknown origin
atggcattgcgttatattttaggtatagatttagggattagctccattggaacagcactttttaagattttaccaggtgcaacagatttaaatgatattcattcatttgagaaaattttagatgcaggtgtacgtatttgttcggttacagaaggtgcagtaaatcgccgaattttgcgcagtcagcgcaatgctaaaaaacatagaaaagcccggaaaaaggctctcattgccttattgcaggagtataaacttttgccattggacaggtcagagcttgaacttggcttgcgttcacagccctatgcattgcgggcaaaagccatgcaggagcctttcgacaatccctttgaactgggcttttgtattatgaatattgccaagcttcgtggggcaggctttattgatgaagctgaagaaaatgaggacgaaaaaaagaaaagcaaaacagccaaccgttatcaattccttgagcaggagctgaaaacgaagaacattacgctttctgaatttttggcggatcatttggcaaaaaataactgtattcgtcaacgcttggattttatagcggagaaagtacctttttctgtgcctcgctatcttgtcaagcgggattattatgcccttatggaaaaacaggcaaagcattttggcatatctgacgcacaggtaaaagccatttataccacgatttttcaggattttccaaaagctccctatgccaatgctccgtgttcgcttttgccggagacaggcagcagattgccaaaaatgcacagacttgcggaagaattacgaatttatcagcaatgcaataatatccgctataacacagttgaacatactgacatttatcagggattaacaagacaaatgcgggatgctcttgcggaaaagctcatgcagggtgaagggcttaataaaacaagtattaaaaagatacttcaaactttttgcaaagaaaaaattaaaagcattaattgttatgcccaggatgaagaaatcaccgcgattaagccttttgctcatgtgaaagcttttgcgggtatccccactttttggaaactgccgcagcaaaaacaggatgaactgattgaatttatcgctgatccgctggatgtcaaggcaaagtcagcgaagcctgttttatatgatgaagaaaaatttttgcagatttgtatggaaaaattacggctttccggactagagggcgagcaaaaactgtatgctgcgctgaatttattacctaaagacagaactatgcttggcaaggcggcaagtaaggcaattttagcaaagcttattgagggtgctgaaattgatggagtatggaaagcacccacttatcatgacgctgtgactgcctgtaattttgttcgggcagatgaagatcaaaaagaatacgattttctgccctattatggagaagttttggtcaatgatattttgcccattcatccctggcatctggaacgcacggcagaagaagaaaaaattggacgcattgccaatcctgttgttcactccatgctcaatcagctgcgcaaggtagtcaatgaaataattgccttgtatggcaagccggaaatgataaaactggaaattgcccgtgattttggtttgtcaaaaattaagcgtgataaattagaaaaacagcgtaaagccaatgaaaaaaataatcgcgatattgatgagaaactgcttgggtttgggtatgctcccacaaagaaaaatcgtttgaaatatcgcttgtggaaagaacaaaacggcaaagatatttattcccggcaagaatttgaagtttcagattttagcaaatatcaaattgaccatattattccacaagaggcaggcggaacgaattcgatctgtaatttggtattgacggataaaaataatgtcaaaggaaatatttttgcctatgattttattcaggaaaaatttcctgaccaatgggaatccataaaaaaagagatggaagaaatgcctaaaaacaaggcatggcgtttcacggctgaagcaaaaactcgttatgccctgtatggtgacgaaacagacgaagactatgcagaccgtcgtttgcaggatacccgttatatgtccaaggcggcacttcgttatctttcctgtatttgcaaaaatattttggcaattcgcggcggcatgacggcacagctgcggcatttatggggttttgacggcatagaatatgaacttatgggcttgaatgttccaaaagaaaggatagaccctaaaacgaaacttgcatttaaagatagtaacggagatgtggtaataaaccctgattgggaggcaaaaccccgtattgatcatcgtcaccatgctgtggatgccatggtgctttgtgcgattacgcgttctttggctcaaaaaatgtacagggcagataatcgtaataaaaaaattgatgagtccatagcagacatgccctttagaaaatctcctaaaaattcagagttgaaatcttttagagaacttgtgcttgaaatgctgaaaacgattaaaatttcccataagccagaacacgacaccaatactcaattgcataatgaaacagctattcgcattcttgattatgatgaaaaagatcagctttatattgcaaattatatgcgttcgctcagtaatattgatagtttcagtaaattagaaactattgctgttgctgaaaatttaggcaccagtccaacggtgcggaaaatgcgggagcgctgtgcccatattattaacgatgtgagtgctcagcgttttgccgcagaaaaaagtctcaagcaaaaaaatactgataatgctgcacagggattaaaagaggtaaaaattactgatcaagctcttgtgcaggaggcaatacgtcttgcaaaggtggggaacaaatatcctcgccttgaaaagttcacccttgtaaatatccgcaaaaaacagcaatgcgggtatgagccagccagcaatcaccgcgtggatttctttgtgtatacagacggtaaaaagaaagatgaaattggctgggaatgtataaaaagcattgatgccgccaatcctaattttaagccaaaatggcaggaatatggagaacttgtttggagtgtatgtaaaggtgacattctggaactgcactttgataaagagacattgctaaaagaaaaaattcctatggcgtttgtaaggcaaaatgagcagcaagaatattgtatgcttgcaaaagtgttaaaatttacaggtacatatattgtctttgtttcagcttttgatgcacgagctgatcaaaaaaatgctttgaaggaaaatccggaaccatttatgcgctggaaaagcggtaactgcggattatctttttattgcaaagcaaaggctcgtaaagtgcttcttagtccttttggaaaggtaaacaagaaattgcaaagattatggcatggcaagaaagtataa

SEQ ID NO: 61 - DNA, 4272 bp, Unknown
  Synthetic sequence or sequence of unknown origin
atgaataaaattcttggaattgatttgggaactggttcgattggtgtttcattgagaaatccaaacttaggttcaagtttgtttgaacaattggaatatttttcttcagacattttccagtcgggtgtaggtaaagataaaagtggggaatactcgttagctgcagaacgcttaagccacagacaaagcagaagattgaaagcgtctcgtagaagaagattgtgggcaacgttggaactcctcattgaatatggtttatgtccattagactctttattgttgaaagactggaaaacctatgataaatcgaaagctttattccgttcctatcctaattctgataaggctttttcgtcatggattatgatggactttgattgcgatggaattcccgattatagtagcccttaccagctacgccgcgaactagctacggttcagttggattttgctaaggctgagaataaaagaaaattagggcgtgctttgtatcatattgcacagcggcgtggttttaagagtagtaaaggtgaaacgatgagtgcacaagagaatgatagtaaagagtcttttgatttatcagataaggatattgctcttgagatgcagaagtcggaaagtaaactttcacaagatcttaagcaatatatggcggagcatcagtgtcatacagttggtgaggcatttgcttgccttgaagatgaaggtattcgtgtaaggaatagccgatatgcagcagtaagaacacaatacgaagatgaaattagatttatttttgactttcagaatggtctgagtcttgattctgatttatttaagaggctgattagtaagaaaaaaggtgtaggaacaattttctatcgcaaacctttgcgctctcagaagtggcttgttggaaaatgcacgttagaaacgaacaagaccaggtgtcctattagccatcctgaatatgaaaagttcagagccttttgtcttcttaataatattaagatacgcacagattatttgtcagactggcacccactgactgttgaaactaaaaggttgctttttgaccagatattcactaaacgtgtaaaagcggatttcccatttaaggatattcgcgagaaacttcagattcttttacatcaaagatttgacggtgattgtacaaaggagagacgcacaattaactataaggataaagtaagtatagcaggctgtcctgtcattgctcgtttgcgaaaccttttaggggatgagtgggaacaattccatgccatgggtcagaaacagcgaacgtctcatagtaaacatcatatcggcaaacattgtgttgagtattccgcttatgatatatggcatatttgttatgaaaccgacgaccctgaatatctgacggagtttgcattgcagaaactcaactgggacgaggaccaagcaaaaaagttagtgcgactatggtcaactcaagcacaaggctatgcaatgctaagtttgaaggctattaccaatatcaatagatttttggaaatgggcttgatatactctgatgctgtgttgttggccaagattcctgacatcatccccatgactaatgacgatattaagaacttggttaatgtttatacagatactataaaagactcaattactcaggaaaaaacctgtaataccattgtgaactcattaattgccaattataaagcaatggatgtcacccatcagtttgcttttcataacacctcctatactcttgatgaagcagaccgacgtgaagtagagcgtcaaatagtcgagacaattggcattaaaacttggggactgatggatgtagatgaacagcgtcagatatatgatactgtggagcgtaagtaccaggagtttttctccagtacgcagcgcgactatttcaaattgcctaaactctcggatgctctcattgaatatctaacagggaagtatcccaatatcccactgcggcaatggaagaaactctaccatccttctcagatttctttgtacaatgttgataaagtaacggattcaggatcggaggtactccgtctggggtcacccagcattggtgcaatgcgtaatcctgtggcaagaaagaccttgaatatccttcgcagaaagattaatgcaatgttggatgcaggcctcattgacgtagatgatacaagaatcgttgttgaaactacacgtcaatttaatgactccaacatgcgctgggctatcgaaacttatcagcgagagagggaaaatgagaatcaggaaatccgcaagttgctggaagaattattgccagaccgtaaaatgagcgagtctgatattactgcggccagaattgcttttgaacagcaaggagtcgataagtacaaggaaaaaggtcgtgtatttggcatagatgtcagtaaatatcgtctatggaaagaacagggtggtatatgtatgtatacaggaaagctcatcagcatcagcaatttgtttaaggaaggttgttttgatgtcgaacacacgattccgcgaagcctgtcgtttgatagttctgatatgaaccttaccatgtgtgatacttattacaatcgttctatcaagcagaaccggattcctactgagttacctaattttgaacatgatgcagtaattaacggcgttctctatactgccatcaaaccgcgcctcgaagcttgggaaaaccgagttgagcgcttgagagacaatgtgaatttctggaaagcgcaatcgcggaaggctttcgaaaagtcaagaaaagactattgcatacgtcagcgccacttgtgggaaatggaacttaactattggcaggggaaagtcagtcgttttacgatgacagaagtgaccgatggattccgtaacagtcaactggtggatactggaatcattacaaagtatgctactctctatcttaaaagtcttttccacaatgttgaggtgcagaaaggtagtgcaactgccgaattcaggaaaatgttaggaatccaggcgatggatgaaaagaaaaatcgaagtatccactctcatcatgccatcgatgctactgtgttgacattaattcctgtcgctgccaaacgacagaaaatgctcaaattgtactatgaaatagaagaactaaaagagcttggactcaattctgacgataaaaaagcgatgttgcgccacgaaatagaagaatgtgaattcgagaaagacgtaagtctgattccttcttatatagaggaacacattgtcgccaaacatcattccgaagatagaacctttgatcattcaaaacgccgcccagataaaaataatcatgtggcaggtggggattctgtgcgtggccgtctgcataaggatacctattatggtgccatcaaacttcctcaagaaatcggaacgggaatagatcgtatgcccatggttaaagatggtaagtttgtatatcctgctaatgatgccatcacaatggtcatgaatgtcgaaatcacctctttcacttcagaaaaagacttctctatcattatcgatccacgtgtgaggatgtccattgccaaagctgttgaaaaaagattaggcgaaggcctttcattcaaggaagccattaatcaacctttttggatgttaaatgacgatggcattgaaataaaggaagacaagaatggaaaacccatttctccgattcgtcatgtccgttgtaaagtcaaggcgggcaggggcttcatgaccgcagaaaaagctttggagatacgacagcacaattttgtctcgacgaagtcaaatgttaatgtgcccaataaggactataagcgtaaagtttatgcgcagaatgacaccaactatttatacctgctatatgaaggtataaagaagggtaaagttgacaggaagagtcgaattgttaatttatgggaggctaccttactcaaaaagaattacagccatcaaacaattgatacgattattcgtgaaaccagcgactataatcatataaccgagaaaaatgtagagtatcgcctctctgcaatcatccgtgttggtgactatgtcttgctctggaaggattctcccgatgaacttcggggaatggatgtggctcacttgagtactcgactttataatgtggtgaagtttaatacaacgagctccgatagaatttttcttaaaggtcatttatcagcaacgattgacccagacttgagtttggtttcgaatgattttaattgcctcattgaacatcgcgattttgaaatagatacattgggatttatcactttcaaagattaa

SEQ ID NO: 62 - DNA, 4542 bp, Unknown
  Synthetic sequence or sequence of unknown origin
atggaagacaaaagaaacattcttgggttagaccttggcaccaacagcattggttggtgcgtgatcagtgagtctaacgcatgtagcgagactgaacaagtccgtaagattgaagatgctggttgccgtattatccctatggatgctgccatgcagagcgattttgccaagggaaacaccatttcgcagacggccgaccgcacgagttcgcgtggcagccgccgtttgcgtgagcgctcgctgctgcgccgttgccgcctcctgcgtgtgctcaacgtgatggagttcctgcccagccactatgccgcgtcgctcacgcgctacggccgctttcgcaaccacgaggagtgcaagctagcatgggccgttggtgaggctggcaggccgtacttcctcttcaagcagtcgtatgatgaaatgctgcagctcttctggcagctccatcccgatctccagagcaacgggctgaaagtgccttacgactggacactttattatttgcgccacaaagccctttcacaacccatcacgccacaggagctcgcgtggctcctgctctccttcaaccagaagcgcggctattaccaggcacgtggcgaggaagagcgcgacgaccgcagcaagaaggaagagtactacaaactcaaggtcgtcgacgtggtcgatacccacaccaagaagggcaaggccacatggtacgacgtcatacttgaaaatggcatggtctaccatcgcgctgccgacgtggcccccgactggataggcaaaacaaaggagttcatcgtcaccaccgcgctcgaagccgacggccagcccaagctcgacaaggacgggcagccgaagcgctccttccgcatgcccggcgacgacgactggggtttgctgaaaatcaagacgcaggccgacattcgcacctccggcaaaactgtgggtgcctacatcttcaatgccctgctggccaaccccaagcagaaggtgaggggcaaactcgtacgcaccattgagcgcgacttctatcgcgacgagatagtcaagatacttgaggcgcagaagcgtttcatgccgcagctcaccgaccccgcgctctatctcgattgcatcaccgagctttatccgagtaacgaagcctaccgcgcctccatctcccagcgcgatttcacctaccttttggtcgacgacatcctcttctatcagcgtccgctcaagagcaagaaatccctcatcgctgagtgcccgtatgagagtcacgtgttcgttggtcccgacggccagccgcagcagcgctttgtcaagtgcatagccaagtcgcaccccctttatcaggagttccgcttatgggagtttctgtcgcaccttcgcatctacaagtcggaggtcgatgcctcaggccgcttgatggacgactgcgacgtcaccgcgcagttcctccccgacgacgacgcctacgtagcccttttcaactatctcaacgacctgccctccatcaagcagaaggacctgttgggaaaatatttcaaaatcaagaaacccaagggcaccgatgccgaactgccctatcgctggaattacgtgcaggacaaggagtatccctgcaacgaaacgcggggtgaaatcctcatgcgtctcaagaaggctggcgtcgatgcctccttcctcaccccgcacgaggaggagcgcctgtggcacatactctatagcgtgagcgaccgcaaggagttgcgcaaggccttgcagcgttatgccgacagccatgccttgggccaagagtttgtggaggtcatggccaagcacccgccctatgcttccgactacggtgcctattcggccaaggccatcaagaagctgctgccgctcatgcgccgtggatcctattggcgtaccgaccacatcgaccccgccacccttgtccgcatccagcgcatcatcgatggcgaagtcgacgacaccatctccgagcgcgttcggctcaaggccatgtcgctcacctcactcgagcactatcgcggtcttccccagtggctggcatgctacatcgtttatggccgccacagcgaggcacgcgacgcccagcgctggacccaccccgacgacatcgaccgctaccttgccagcttccgccagttctccctgcgcaaccccgtcgtggagcaggtcgttaccgaaacgctgcgtgtggtgcgcgacatctggcgcgtgcacgggcatcttgacgaaatacatatcgagataggccgcgacctcaagaaccccgccgacaagcgcaaacagatggcgcagaaggctgtcgacaatgaaaacaccaacctccgcatcaaggccttgctcgccgagttcctcaaccccgaattcggcattcaggaggtgcgcccctattcaccctcgcagcaggaaacccttcgcgtctacgaggacgtcgtgctgcatagtgtcgatgccattcccgatgacattgccgacatcatgaaggccctctcgcaggccgatgccgtcaagaggccgtcgcataagcaagtccaaacttacttagattggctgcaagataattacgtttcgccctacacaggccaaactatccccttggcgcgactcttcacccgcgactacgaaattgagcacatcataccccagtcgcgctacttcgacgactccttgtcgaacaaagtcatttgcgaggccgctgtcaacaaacttaaggacaacgccctgggctatgagttcatcaagaagcaccatggcgaggtggtcgaagtgggcgaaaaccgcagagtcaccatttacgaggtcgacgcctattgcgaccatgtgcagcaagcctataagcacaaccgcgccaagatgaagaaactcctgatggacgacatccccgacgacttcatcgagcgtcagctcaacgacagccgctacatcagcaagttcgtcaagaacctcctctcacacattgtgcgtgaggagaacgagcaggaaaccacctccaagcatctcgtggtgtgccccggcagcgtcaccgaccgcctcaagcgcgagtggggcgtcaacgatgtctggaacagcatcatcctgccgcgtttcgagcgcatgaaccaaattacgggcactacgcacttcaccaccgtcagcagctcgggccacaccatccccgacatgcccctccatttgcagaaaggtttcagtaagaagcgcatcgaccaccgccaccacgccatggacgccatcgtcatagcctgcaccacacgtgagcacgtcaacctcctgagcaacgaggccgccctctcgcgcaccaacgccaaccgctaccagctctcgcgcaagttgcgccgctacgaggacaccctcatcatgcgtaacggcgaggctcgcaaggtttccgtcgccaaggagttcaacatgccgtggcccacgttcaagtccgatttgcaccaagcgctcgagcaggtcatcgtcagcttcaagcagaacctccgcatcattggcaaaaccagcaactacacctcgcgctttgtggacggcgtgaagaaaatggtcaagcaaaccaagggcgacgaccattgggccatcaggaagtcgatgcacaaggacaccgtgtttggcgaaatcaacctgcgcggcatcaagacggccaccctggccgatgccatgcagcgccccgagcgcatcgtctctaccagcctcaaggcgaaggtgcgcgagctgctcagccttggctacacccccgcgcaggccaagcgctactttgacgaccacaacgacgagtggcctgagctcaacacaaggaaaatcgaggtctactacttctcttgcgaaacctccacgcatgtctatgccacccgcaagcctctcgacacctccttcaccgaagccgccatcaaaggcaaggtagccgacacgggcattcagcagattttgctgcgccatctcgcggcctgccagggcgatcccgagaaagccttctcgcccgacggcatcgacgccatgaaccagcacatccgctcgctcaacggcggccgcttccaccagcccatcttcaaggtaagggtctacgagcgcgccgaaaagtttgctgttggcaccgtgggcaacaagaagcacaagtttgtcgaggcggctaagggcaccaacctcttctttgctgtcaccgaggaggaaaccctcaacaagacgacgggcttgcctgagaagacgcgcaggttccgcaccatcccccttgccgaggctattcagaagatgaaagcggggcagcccctcgacgcccaggccacgttcatcctctcgcccaacgaccttgtctatgtgcccaccgagcaggagttggccgacggctgcatcgcctcaccgctcaacaccagccgcatctacaagatggtttcggcatctggtgtggaatgttgcttcgtgcctttctgtgtggcttcacccattgtagacaaggtggagttctcgcgtcataataaaatggaacgggccgttacgggcgagatgattaaacgagtctgcatccccctcaccgtcgaccgccttgggcgtatcattaagataggggtttag

SEQ ID NO: 63 - DNA, 4152 bp, Unknown
  Synthetic sequence or sequence of unknown origin
atggaaaaacagaactactacataggattggatatgggaacatcctctgtgggttgggcagttacagatgatagttatcatattatcagacgaaaaggcaaagatatgtgggggattcgtgagtttgaagaggctaaaacttctgctgaaagaaggtctcatagaataagcagaaggaggcttcagcgctctaaggtcaggatcggattgatcaagatgtattttgatgaagaaatacggaaggtcgatccatttttttatgaaagactggacaatagcaagtactatcaggaggacaaggatgaaatcgtaaagagtcccaacggggtgtttaacgataaggaatatacagataaagattattacaatcagtatcccacaatatttcatttgagaaaagaacttataaataacgaaaatgcaccatatgatgtaaggatagtgtatctggccgtattaaatctgtttaagaggcgaggccatttccttaattcgagtttaaggttggatgatgagagtgcagagtttagtcttaaagatgcatattcaaatttgctgacgataatggctgataatttaccagaggagttatcaatagcatttcctgagattgattccgataatacatatttggaattgcagaacatacttggtacaagggaattcggaagaaaacagaagggggagaaggttgccaagttacttggtatagatagaaaacagaaaaaagaaatggaaatagtcaatggaatggttggtctatccatagactgttgtaaactgtttgatatagaggctgatagtaagataactgcaaagttttctgattttgggtatgcagaaaaagaaccggaaatacttgatcagttaggtgataactatggttcaattcttatggctataaagacggtttatgatataggatcattaactgaaatattgaagggacagaaatatctgtcatttgcgagagtggaggattatgaacaacacaaggctgacttgagaaaactgaaaaaagtagtgaagaaatatgcactggaacgttatgattatttctttcggcagaaagaggatggtacatatagtgcttatgttaacagcgtaaattctgaaaaatataatgatttgggttcaaaggatacgaaaccaaacagaagaaatatgaaggctcgttcccgtgatgatttctacaaaggagtaaagaaacttcttaaaggaatgccggaagatgatgctgatgttattgaaattaataaaaagatagagaatgaaacatttatgcctaagcagcttactgccggaaatggtataatcccgaatcagcttcatgcaatggagttaaaaaaaatattggataatgcatcaggatatcttgatttcttaaatgatgtggatgaaagtggatttgcggtaaaagagaggattttgcggttatatacatttacatttccatactatgtaggaccgatttcatccggtagcaagaccggatgggcaatcagaaagcccgggtttgaaaagggggtgattctaccctgggagcttgatgaaaaaatagacagaacagaaactgcaaaacgctttatcgataggatggttaggcgatgtacctatctgaatgatgagatggtattgcccaagtcttctcttaaatatgaaagatattgcgttcttaatgagataaataatatcaggatagataacacaagaattgataacgatctgaagaagcgtctctttaatgaaatctatttgaatggaaagaagccgggaagaaagaaaattgaaagttttctgtatcgcaatggagtgcctagggatgcccaagttaccggtatcgataaggagctaaacaacgcattgagctcatatggaaaattcaaggagatattcggtgatgaattggaaaaggattccgtaaaaaaaatggtggatgatatcatattccattgtacggtatatggagactcaaaaaaatttatctatgactatattcagaaaaactatccagaatcagaatatccgctcttgaataaaaagactataaagagaattatcggtttcaaattcaaagattggggaagattttcggaagagatgcttgatcttcagggttgtaattatgaaacgggagaggtgtattctattctgacggcgttatgggagacaaataacaattttatggaattgataaatagtgattcctttgagtataagaaactgctggaagaaaaaagtgggtctgccataagctcgcttgctgaagttacccctgaacttttggacgaatactatttcagtgcaccggtaaaaaaaatgatacttcagactatgggggtaatcaaagaaatagtacagattatgaaatgtgagcctgatcggatatttatcgaaatgacaaggtcagatggagaaaagggagacaagggacgtaaagattcaaggaaaaaagctttgttagatttgtataagaatataattgatgagttgcatgataagaattattggaaagaccttattgaaaatgcagataaagacggaagacttagaagtaagaggatgtatttgtatataaaacagatgggaatggatatgtatacaggggaacctatagatcttgattatttgtttgatgaaaataggtacgatatagatcatatttatccgagacattttgttaaggacgacaatatagaaaacaacctagttcttgttaataaggcttctaatgcaaagaaaacggatatctatccgattccgggatttattaaagataatcccaaagtgtggaagctgtgggaaatgctacataaaagggggctgataaatgacgttaaatattcaagattaagaaatagcgaaccatttacagatgagcagaaggccgggttcatagcaagacagctggttgagacaagccagggaaccaaaggcgtttcagatatactgaaacaggtgcttccgcaaacgaaattggtttactcaaaagccggtaacgtgtccaggtttagaagtgataataaattctataaatcaagattgattaatgattatcaccatgcaaatgatgcttatcttaacattgttgtaggaaatgtatactacacaaagttcacaagcagtccaatgaactttatcaagaatgagtattcaaaggattctaagaagtttgagtacaatcttgataagatgtttgcttggaaagtagagcgggatggatatacggcatggattccgctaaaaaaaggaaatgagtatatagcaacaataaagacggttgaaaagatgctagcaaagaatacgccgttgcttacaagacagagtttcgtaaaatccggtgtaattaacaaagttactttatatgggaagaatactgcaacgcatgagacatatataccgctaaaaatgtccgatcctaagatgcaggatgttacaaaatacggaggatataccagcgttaatatttgttatttcttccttgttgagcatgagaaaaaagggaagaaagttcgcactatagaggccttaccgggatatttggagaaaaaggtggaaaatgatcctgccgaattggaaagatattgcgtggaaggattaggcttggagagtccttctgtaaggtatagaaagatcaggatacagtcattactaaaggtagatggatactatatgcatctgtcaggaaagtcagggaattcattgatagtaagaaatgcatgtgcgttgtcgatcggaaagaaatggcaagattacattcattatatagaaaagagtgaagaaaatggatttaaatacgatgatagtagaataacaaaagagaataatattgaattgtatgacatcatttctgaaaaacatattgatggagtttataaaaaacgaccatgtgggataggtgatgcagttaagaatggtaagaaaaaatttaaagaacttacaaaagaaaatcagtgtaaggtgattttacaaattctacaaatatcatcaataggaaattataaagctgatttatcattaataggaggggcgtctatgatgggaaatatgaggattagtaaggaaataacaaagaatgaaaaggttatgttaattcatcagtctgttacaggactatttgaagataaacttgttgatttaaaatcgatatga

SEQ ID NO: 64 - DNA, 4623 bp, Unknown
  Synthetic sequence or sequence of unknown origin
atgaaacacatcttaggattagatttaggcaccaatagtatcggctgggctattgtaaacgcagaacaaattgttcgcgaggatgaaacgaattatctgaagcctgtgagtattagttctgcaggtagtagaattatcccgatgtctgcagacattcttggagattttgacaaaggcaattctatttcacaaacagcagaacgtacacggcttaggatggctcgccgacttagggagcgcaacctattacgccgtgagcggatgcttcgaacattgaagctcatggggttcttgccttcacactttgctaaggagattgatatttttggcaagttatttagcaacaaagagcctaagctagcctggaaaaagaatgaagagggcaaaaatttattcatttttcaggattcattcaatgaaatgttggaagattttgcgtgtcatcagcctcaattggttgctgaaggcagaaaagttccatatgattggacgatatattatctccgcaagaaagctttgactcaaagaattactaaagaagaacttgcctggattttattacaattcaatcagaagcgtggatactatcagttgcgaggcgaagacgaagaggatgataacacaaaacgggttgaataccttgctctaaaagtagaacgggttgaggcgacagatgaaaagagaggcgatgaagtctggtacaacgtttatcttgaaaatgatatggtctatcgacgtacaagtcgatatcctcttgattgggttggaaaagtgaaagagtttattgtaactacagaccttgagaaagatggtagtcctaaaaaagacaaggaagggaatataaaacgttctttccgcgcaccaaaagaagatgattggacattgttgaaaaagaagaccgaaaatgacattgaaaacagccagaagactattggctgctatatttatgacacccttttgcaaaagccaaatcaaaagattataggtaaacttgttcgtaccgttgagagaaaatactataaagacgaactgcttaggattttgagaaggcagcaagaactcattcccgaattgcaagatactgaactctataagaaatgtatagaagaattatatcccaataatgaaggacatcgtagtaaccttgccaaatctgatttcgtcaatctgtttgtcaatgatattctgttttatcagcgccctttaaaaagtaagaagtctcagattgaaaactgtccttatgagtttcataaaggcatagatgggaatttatatcctgtgaagtgtattgctcagtctaatcctttattccaagaattcaggctttggcagttcatacagaatctacgtatatatcaacgcgagagaatcatcaccgatggacaattggccttattcggaagtacacatacagggaagttacaaactgatgttgacgttacggctgagtttctcaaatcagaggaagattatgtcaaactattcgattggctaaataacagaaatgccatcaagcaggacacattgctcaattcttttttcaaaataaaaaaagaaagagggaaggacaaatacccctatcgatggaactatgtcgaagacaaagaataccggtgcaacgagacacgagcagcgatgcttacaggattagagaagtctggaatccgtactgatgttcttacccatgaaatggaaatggcattatggcacatcctctactccgttgaagacaaaacagaaataggaaaagcactaaagacatttgctaaaaagaacaaccttggtgaaatgtttgcagatgtcttctgcaagatgaaaccatataaaaaagaatatcgttcgtactcagaaaaggcaatccgaaaattccttccactcatgcgaatgggcaaatattggaacaaagagaacattgacgacaaaacattatcaagaatcgagaaaatcatcacaggagaatacgataaaaccatcaagaatcgagtgagagagaaagccattaacctaactgacattgaccacttcaaaggattgcctgtatggttggcttgctacattgtttacaatcgccattctgaagcaagagagattgaaaagtgggacaagcctgaagacatagatcgctatctgaactccttcaaacagcactctctaagaaatcctattgtcgaacaagttattactgaaactttacgcactgtacgtgatatatggaagcaggaaggtgacattgacgagattcatgtggagttgggtagagaaatgaagaatcctgctgataagcgcaggctaatgaccgaacgtattcaacaaaacgagaataccaatctacgaattaaagccttgttaatggaattccttaaccctgaactcggaatagaaaacgttcgtccacactccccgagccaacaggacatcttaaggatttacgaagagaatgctctggataatctcaccaaagaagacgcagaatatgaatttgttacaaagatatccaagatggctcaaccttccaaatcagacatcattcgctacaaatgttggttggaacagaaatacagatcgccatatacaggcaagatgattccactaagcaaattgtttacacctgcatacgagatagaacatatcattccccagtcacgctattttgatgattctttcagcaacaaagtaatatgcgaggcagaggtaaacaagctaaaggacagattgcttggatatgagttcatcaaggaacatgctggcgagattgttcaactaagccaaggagacacagtgaagattctctctgtggaggaatatgagaaattcgtaaaagattattatggctctaacaggacaaagatgaagaagctgttaatggatgatatccctgatggattcattgaacggcaactgaatgatagccgttacattagtaaggtcatcaagacactactttcaaatatcgtacgtgagaaattagagaatggagaatacgagcaagaagctgtttccagaaaccttatttcatgcaatggttccattactgaccgcctaaaaaaagactggggcatgaacgatgtatggaatcatattatcctgcctcgcttccagcgtttgaatgaacttacagggacgaacctctttacaactcaaaatcacgaggggcatgagattcctgcaatgccatttgaattacaaaagggattcaataaaaaacgtattgatcaccgccatcacgcgatggatgctattgttattgcctgtgcaactcgcgaccatgtcaacttactaaacaacgaagcggctcattctaagcacaacgctaatcgatatcagttacaacggaagctgagacgatttgcaaagattactatcgacgggaaagaacgtgagattgctcaagagttcttaaaaccttggcctactttcacatcagatgccttacgaacaatacaaagcatcatcgttagttttaagcaaaatttacgtgtcatcaataagacaacaaactcctatctgcattatgatgagtatggaaagaagatatatcataagcagacgcagggtgagagttgggctattcggaagtccatgcataaagataccgtattcggagaagttaatctgcgcaagaaaaaatcagtttcaattaaagaagctatcgtgaagccagaagccattgtaaacaaagaattcaaagaaaaggtaaaagaactcatcgctcaaggtcatgatgccaaatacataaaaaaatacgttgaggataataaagacatatggtcagatataaacccgtcgaagatagacgtttattactacacccgagatgaaaagaaacaaaatggcgaacccaaagaacgctattttgccacacgtaagccattggatacatcctttgaccagaagaaaatcaaagagagtataactgatacaggcatacaaaagatactattagcccatttggagtctaaaggaaacgaccccgaacaagccttctcacctgatggtattgacgagatgaatcggaatattgtgaccttgaataaggataaatttcatcaaccgattatcaaagtgcgcgtctatgaaaaggctgacaaattctgcatcggacagaaagggaataagaagaaaaaatttgtggaggcggctgacggaacaaatctcttctttgctgtttatgaaactgcagataagaagagagtgttcgcaaccatttcattaggcctatctatagattgccaaaaagaaggttcccaatattggattaagctacttgatgaaaggctaagagacaagacacccacagaagaattacagccttatcagaaaatggatattcctactgatgctcatttgttattcattctttccccaaatgatttagtttatgtcccttatgatggtaaacctacggatttaacgcaggttgacagggatagaatttatagggcggttagtttcaataaaaaacaatgtttctgcattaagtgtaatgtggccacccccattgtaaacaaagttgaatacacaacttcaaacaaaatggaacgcgccactaccggtgaaatgataaaagaggtctgcgtccccattaaagtagatagacttggcaacatcactaaaattggataa

SEQ ID NO: 65 - DNA, 4137 bp, Unknown
  Synthetic sequence or sequence of unknown origin
atgaaaagaattataggtttagaccttggagtcagcagttgcggatgggcatacgttaaagaagcggagaatgaggatgaaaagtccgaaattctgcgtataggagtaagagtgaatccactgaccgttgacgaacagagtaatttcgagaaaggcaaaagcattacgaccaatgcggagcgacaaatgaagcatagtgctcgtatcaatctgcaacgctacaagttgagacgtgaacacctcattgattatttgactaaagcagggttcatcaacgaaggaactctcctttgtgaaaatggaaacagaaccaccttcgagaccttccgtcttcgtgccaaagcagcaaacgaagaaatcagtctttctgaattagcacgtgtcttgctaatgattaacaagaagcgtggctacaagagcaacagaaaggcaaatggctcagaagaaggtgccttaatcgacggcatggcggttgccaaatatctttacgagaacgacattacccctggacaatatgcttacgaactgaagaaaaaaggcaaaaaacatcttcccgacttttatcagtctgacatcatggatgaattggacaagatatggaatttccaacaaccattctatcccaacatcctgaccgacgaattcagacaagtgctggcaggaaagagcaaaaccaattcgacaaaattgttccttgcacgctattccatttatacggcacagaataaagaaaaggacaaggtcttacaagccttgaaatggcgttctgatgctttggcaagaaagctcgacatcgaacagcttgcctatgtcatttgtgagctgaacggacttatcaacaatgcaagcgattatcttgggaaaatcagcgaccgaagcaaagaactgttttttcagaacctgaccgtgggacaataccaaatgaaaatgttggacgagaaccctaatgtcagtctgaaaaacatggtgttctatcgccaagactatctggatgagtttgaacgtatttgggaaacacaagcgaagttccatcccgaactaacaagagaacgaaagaaggagatcggcaacatgattatcttctatcagcgtcctctgaaaagcaagaaaagtctcatcagcatttgcgaattggaaggaaagcagatagaagtggaagtggagggaaaaaagaaaaccatcacagtgggaagcaaagtgtgccctaaatcctcacctctcttccaagagtttagaatctggcaacgtctcaacgacatcgaacttaccgacctgtcaactcgtcaaaaatacggtttgaatcaagaacaaaaggaattgttggcaaaagagcttgaatacaaacccaagatgaccaagcagcagatgctgaaatgcctgtccctcaagcccaaagactatgacatgaatttcaaggaagtggatgggaacaccactcaggcaatgctattcgaggcttacaggaaaatcatcgaaatgtcaggacacggagaacatgatttctccaaaatgtctgccagcgacattagcactctcgtcgaaagcgtctttgctgctttaggcttcaacaccagcgtactccattttgatgctcaagcagcagacatctcacaggattccatgtatcagttgtggcatctactctattcctacgaaagcgacaactccgctatgggcaacaaggcattgatatgcagaatccaagaactcttccatttcgattccgatgaatatgcaaagatacttgctggtatatccttcaagcccgattacggcagtttgagtgctaaagccatcaagaagattcttcctttcatgaaagagggcaatgactattcaactgcttgcgtgtatgctggctacaatcattccaagcgttctctcaccaaagaagaactggacaacaagccactgaaagaccatctcgacattctctccaaaaacagccttcgcaaccctgtcgtggaaaagattcttaaccagatgattaatgtggtcaattctctgattgacacctacggcaaacccgatgaaatacgtattgagttggctcgcgaactgaagaaaagtgccaaagaacgcgaggcaatgactgatgccatcaatgcggcaaatagagagaatgaagaatataagaaaattcttgaaacagaattccacattccacacgtcagcagaaacgacattctccgctacaaactctacctcgaactgaaagacaacggattccatacgttatattccgacacatatattccacgtgaaaagcttttcagtcgagatttcgacattgagcacatcatccctcaagccagtctcttcgatgattcattctccaacaaaaccctggaaagcagaagcatcaatatcgagaaaagcaattccacagcatacgattatgtgaagggaaaatatggtgaagaaggtgcgaaaaattacaagacgcgagtggaggatttattcaagaacggaacaatcagcaagacgaagatgactaagctcttgatgactgctgacgacattccaaccgacttcatcaatcgagatttgcgcgattcccagtacattgcaaaaaaggcaagagaaattctggaagaaatagtccgtgtcgttgttccaacaacaggaagtatcacagaccgacttcgcgaggactggcagctggtggatgtgatgaaagaactcaattgggacaagtatgaccaactcggtctcaccgaaaccttcgaggacaaggacggaaacaccatccgcagaatcaaggattggaccaagcgaaacgaccatcgccaccacgccatggatgcactcaccattgcattcaccaagccttctttcatccagtatctgaacaacctgaatgcacgaagcgaccgttcgcaaagcatctacggcatagaacggaaggaactctatcgcgataagcataacaagttgcgcttcaatccgccaattcctttagacgaattccgcacagaggcaaagcgtcatctgcagaacatactcgtttccatcaaggcgaaaaacaaagtggttacacgcaatgtgaacaagacaaaatgcaaggagggttttaacaccaaagtacaactcactcctcgcggtcaacttcacaacgaaacaatttacggaagccagcagcgatatgctattcatgaagaaaaggtaggtgcatcgtttactgccgaaaaaatagccaccgttgccaacaaaaagcaacgagaagcactgctggcacgactgcaagcatacaacaacgatgccaagaaagcattcactggtaaaaacgcactcgacaagaaccctgtttggctcaacgaagcccacaccacctccgtgcctctgaaagtgaagtgcttgacaatggaaaccatctacaccatccgaaagcctatcaacaaggatttaaaactcgacaaggttgtagattcccgcatcaagcaaatactgcaacaaaggctcgacaaatataaaggagatgccaacaaagcattcagcaatcttgatgaaaaccctatttggctcaatcaagagaaaggcattgccatcaaacgcgtggctatttttggagcggtttcagcaaaagctattagagataaaagagataaatatgggcatttcttgttggatgaaaacaaccaacaccaaccaagtgattatataaatactaacggaaatcatcacgttgctttttatgttgataaagaaggaaatatacacgactatattgttacattttttgaagcagtaatacgtgctataaacggctttcctattattgataaagaatacaataaaagtattggttggaacttccttttcacaatgaaacaaaatgaatattttgtgtttcctaacactaaaacaggattcaatccaaaagaatatgatttaacaaatgaatcttattatcatttaataagtccaaatctgtttagagtacaaagtatatcaaaaaaagaatatggcaatgcagtagtaagagattttatatttagacatcatttggaatcatctgtaaatgtctccataaaagatatcacatataaacaaatgaaatcattgtcctttgttaaagacatagtcaaggttagattaaatcacatcggtcaaatagtgtctgtaggagaatactaa

SEQ ID NO: 66 - DNA, 3294 bp, Unknown
  Synthetic sequence or sequence of unknown origin
atgcttccgtacgggattggattggatatcggtatcacatcggttggctgggcgacggttgctcttgacgagaatgatcggccatatggcattatcgggatggggtctcgaatttttgatgcagcagagcaaccgaaaaccggcgagtctttggctgcaccgcgccgggcggcaagaagcgcgcgacggcgtcttcgccgtcatcgccatcggaacgaaagaattcgagctttgattctgcgagaaaacctcctttcggaagggcagcttttacatctgtatgacgggcaattgtccgacgtctattcacttcgcgtcaaggcgttggatgaacgggtttcaaacgaagaatttgcgagaattttaatccacatttcccaacgacggggatttaagtccaaccggaaaggtgcgtcttcaaaagaggacagcgaacttcttgcggcaatcagcgcaaaccaggtacgcatgcagcagcagggataccgcacggtcgcggagatgtatttgaaagatcccatctatcaagagcaccgccgcaacaagggtgggaactatattgcaacggttagccgcgcgatggtggaggatgaggtccatcaaatctttacggggcagagagcctgcgggaatcctgcggcgaccaaggagctggaggaagcctacgtcgaaatcctgctcagccagcgttcctttgacgacggccctggggatggcagtccgtatgctggcagtcaaatcgaacgcatgattggcaagtgtcaacttgaaaaagaagcaggagaaccacgtgctgcaaaagcaacgtattcgtttgagtatttttctctgctggcagccatcaacaatatcagtatcatttccaacggacaactcagcccgcttaccaaagagcagcgtgaaatgctgatcgccttggcacataagacttcggaattgaactatgcaagaatccgtaaggaactggggctttccgaagcgcagcgctttaatacggtttcctacggaaaaatggaaatcgcagaagcagagaagaaaaccaaattcgagcatttgaaggcttatcacaagatgcgcagggaattcgagcgcattgcaaagggacatttcgcgagtatcacgattgaacagcgcaatgccatcggtgacgtgctgtcaaagtataagaccgacgcgaagattcgccctgcgctgcgggaagccgggctaaccgaactggacattgatgcagcggaagcgctgaacttcagcaaattcggccacatttctataaaagcctgcaaaaagatcataccttggctcgaacaggggatgaaatatagtgaagcctgcaatgccgcaggatataacttcaaaggacatgacggtcaggagaaatcgcacctgcttcctccgctggatgaagaatcccggaacgtcatcacaagccctgtcgcattacgcgcgatttcgcagacgatcaaagtcgtcaatgcaattatccgggaaagaggctgcagtccgacctttattaacatcgaattggcacgcgaaatgtccaaggatttttatgaaagaatagaaatcaaaaaagagcaggatggaaaccgcgcaaaaaacgagcgcatgatggagcgtatccgaacagagtacggaaaagcctccccaaccggacaggatcttgtgaagttcaagctctatgaagaacagggcggcgtatgcgcatattcactgaagcagatgtcattggcacacctgtttgaacccgactatgcagaagtggatcacatcgtgccgtacagcatcagtttcgacgacggatataaaaacaaggtgctggttttggccaaagagaaccgcgataaaggaaatcgtcttcctttgcagtatttgcagggaaagcggcgggaagatttcattgcctgggtgaacagctgcgtgcgagattacaaaaagcgtcagcgtctgctgaaagaatccatttcagaagatgatttgcgtgcattcaaggaacgcaacttgcaggacaccaagaccgcttcacgcttcctcctcaactatatcagcgaccatttggaattcacgcagtttgccacggaacggaaaaagcacgttactgccgtaaacggcagtgtgaccgcttatctgcgcaagcgatggggtattacaaagatccgtgaaaacggtgatctgcaccacgcagtcgatgcattggtcattgcctgtacgacagacggaatgatccaacaggtcagtcgatttgcacagcatcgcgagaatcagtatagtttggcagaagacagccgattcataatcgatcccgaaacgggcgaggtgatcaaggagtttccgtatccttggccgcgttttcggcaggagttggaggccagactcagcagcaatccgggactcgctgtgcgtgacagaggattcttgctgtatatggcagagagcattccggtccatccattgttcgtttcccgcatgccgcggcgaaaggttacaggcgcagcccataaagagacaatcaagagcggaaaagcacagaaggacggtttgttaattgttaaaaagccgctgacagacctaaagctggacaaagaaggcgagatcgcaaactattataatccaatgagcgaccgcttactctatgaggcactcaagaagcgtctgacggcttttaatggagacgggaagaaggcttttgcagacccgttctataagccgaaaagcgacggcacgcagggaccgttggtcaataaggtcaagctgtgtgaaccctcaacgctaaacgtatccgtaattggcggcaaaggcgttgcggaaaatgacagtatggtgcgcatcgacgtgttccgggtggagggagacggatactactttgtgcctgtttacgtcgcagatacggtgaaaccggaactgcctaacaaggcgtgcgttgcaaataagccctatacagattggaaagagatgcgcgaaagtgattttctcttctcactttatccgaacgatttgctgaaggttacgcacaaaaaggcgcttattctcaccaaagcacaaaaagacagtgatttgccggactgcaaagaaacgaaaagtgagatgctgtactttgtcagtgccagtatttctactgcatcccttgcttgtcgcacccatgataacagttataggatcaacagcctgggtatcaaaacgctggaggcccttgaaaagtatacagtcgatgttttgggagaataccatcctgtcaggcgcgaaaccagacagacgtttaccgggagggaatcgtcagggcattcaggaatatcttga

SEQ ID NO: 67 - DNA, 4110 bp, Unknown
  Synthetic sequence or sequence of unknown origin
atgaaaaaagtattgggtctggatttagggtctgccagcattggatgggcagtagtaaacgtagctgagacaaaagaagaaaaagcagcaatccttggctgcggatctagggtcattccaatcagtgccgaagaaaaagatagttttgaaaaaggcaaagcaataagcactaatgccgaccgcactcttaagcgcggaatgagacgcaacttgaaaagatatgagcaaaggcgcgacgacctccgccgccttttcattgatcagggatggatcagcgatggtgagcccctctccgagagtggcaaaaatagtacatatgagaccctatacctacgttccaaggccgcacaggacgagatttctctaaaagacctagcccgtgtcctcctgtctattaacaaaaaacgaggctacaagagttcaaggaagactgattccggagaagacgggcaactaattgacgggatgagcatcgcaaaggagcttgccaaaaccggcaagactcccgctgaatttgcattggagtcaatcaagagcgggaaaagcggtaaatttgatttctatcgttctgaccttgagaaagagttcgacagaatctgggactgccaacagtccagctatccggagttgttgactgatgaattcaagagtcagttgtccaagatgaacaaaaccggggccaccaaagcattcttcgcaaaatacaaattaaccactgccgagaataagggtaaggaccgtctccgcaacagtcttgaatggcgagtttcggccttaaaggagcctcttgacaaagagaaaatggcttatgtcatatgcgagctaagaggagccatccaaagttcaagcggttatctgggcgacatcagcgaccgtagtaaggaactgtatttcaaccaggaaactgtcggtcagtatttatacagacgaatcaaggaagaaaaaggattcagcaccagaaaccaggtattttaccgccaggactacatcgatgaattcaacacaatctgggcgacccagtcagcattccacccggagttgaccgacaccctaaaacgcaagattgccgaccggatactattctatcagcgaccgctgaagtctcaaaaagggctgatctccttctgtcaattcgagagtcggccaatcaaagttattattgacggcaaagaaaagacacgtacgaccggaagcaaagtagccccgaaatcttcccctctgtttcaagagtttaaggtcctccagatcctaaacaacgtgaccatcaaagaccgccgcacctttgatagccgcggccttggcaaggaagagaaggaaagccttgccgccacactgagaatcagagagaagatgaaaggatccgacgccttgaaacaattgggcttggaccctcgtcggtatgacctgaattacaaggagttagagggaaattctactttattctccctattctccaaatacattgagattgtcaatctcgagaaaaacagtgagtatgagttgcagaagatggcctatgagaaagccttggaagtgattcgcgataccttcaataagcttggctgccattccgacatttttactttcaactcagaccttcccaaagaagaatacgagcagcagcctattttcaaactttggcatcttctctattcctatgaaggcgacaaatccgtcaccggaacagcttctctagtgcggcacattatggacataagcggccttcctgagccccaatccaagattattgccggagtttcattcaataataattatgcatctttaagccacaaggctataaagaagattttgccttatatgaaggaggggcatcagtattccgacgcctgcgcaatggccggatacaaccactccaactccctgaccaaagcagacatagagaataaagtccttgtagactccctggcacagctgcccaagggagcgctccgcaatccggtggtcgagaaggtcatcaaccagatgataaatgttgtcaatgccgcagcagaagcatatggcaagccagatgaaatccatattgaactcgcgcgtgaacttaaatccagcgcaaaagaaagagaacaggcaacaaatggtatccaagccggcaataaaaggaatcaagagattgagcagattcttaaatcgaagttcaacatacagcaacctagcaagaatgacattcttcgctataaattgtacgatgagctaaaagaaaacggttttaaaaccctttactcgaacaagtatatccctgaatctgcgttattctcaaaagacattgacatagagcatattataccgcaagctctaatgtttgacgactctttctcaaataagacgctcgagtacaaggatatcaatatcgaaaaaggcagaaccaccgccaatgatttcgtaaaagccaagtacggagacgaaggttatgcccagtattgccaacgcatagaatatttatactcaaaaggggttatcagcaatgctaagcgcaagtatttgttaatgaccgaagcggatatcccgaccggattcgtggacagggacttaagaaactcccagtatatcgccgtcaaatccagagaaattcttgaggattatgtcaaggtagttgtacccaccactgggtccgtgacggatcggttacggcaagaatggcagcttatcgacgtaatgaaagaaatcaatttcgctaagttcaggacggctggcaagacctacaccgcaatagattccgagggccggaagacagaaaagattaaagactggacgaagcgtaacgaccatcgtcaccacgcaatggacgcaatcaccattgcatttaccaagcctcagcacattcagattctaaataatttaagagcaaaatgtgacagtaatgaagagttccgtcaattacttgacagccagaccacagacacaggaaagaagcgcatcttcactcctcctatgcctttggatcaattacgcgccgaagtaaagaagcaccttgatgccgccctcgtgtccatcaaggcaaagaataaggtcgttacgcgaaatgtcaacaagataaaacaagcaggcggcatactaagaaagaccgagcttactccccgaggagccctgcataaagaacaagtctacggcaagcgaagggtttatgaagtattttactcacccgttaatgcaaagatgacggaagaggccatagctatggtcgcctctccgaaagaaaaggaggcactgctggcgagattggctgagtttggaggagatgcgaaaaaggcttttacgggcaagaattcgcttgataagaatcctttgtatgtcggcgcagagcaaattccggcaaaggtaaaatgcgtacggtttaaagatatctattcaatacggaaagagttaagtccagaccttagcatcgataagattcttgacaaaggggtcaaggccaaagtcgaggaaagaatccaagaattcggaggtgatgtcaaagctgcatttgccaatttggacaccaatccaatatgtctggacaacgacaagactattcccatcaagagagtcacaatcggagagaatttcgacttgacggctatccgaaacaagcacgacaaagatgggcgattgatacttgataaaagcggtaatcctataccaagtgattacgttaatttaaggaacaaccaccatattgcgctttacattgatgcagacgggaacgtgcaggaggccgtagtccctatgtttgaggccctcaacaggataaatatgcaaatcccggtcgttgataaaaactaccactccgacctgggctggaccttccttttcagtatgaaaatcaacgagatgtttgttttccctgacaagaacacaggattcaatccaaaggacattgaccttctcgaccccgcaaattcttcgctgatcagccctcatcttttcagggtgcaaaagcttagcagcaaagactactacttccgccatcacctggagacgactattggagatgataattcgctaagggatattacttggaaaagaattaagacaatacaactgatggcggacgctgtcaaagttagaatcaaccatatcgggaaaatcgtcgcagtaggagaatatgattaa

SEQ ID NO: 68 - DNA, 3678 bp, Unknown
  Synthetic sequence or sequence of unknown origin
atggaaaacgtcattaaacaacgcattttaggcttggataccggaactaactcgttaggttgggcggtggttgaccgacttccgttaggaggatacgagttggtggataaaggtgtacagatcttccaagaaggtgtaaacatagagaaaggcacccaagaaaaatcccgtgcagcagaacgcacatctcatcgcagtttgcggaaactttattggcgtaggaaagttaggaagattcgattgctgacagtattgagcaatgcaggcttgtgcccttcgcttacatcacaggaattgcgtgcatggcgcatgaatggcaagtatccattgaataatatcgcatttatgcgctggcaactgactgatgagcagaaaggcatcaatccctatgcggcacgttgcagatgcgtagaagaagagttagatatgagcagccctgacaatcgttatcttgtagggcgtgctatgtatcacatcgcgcaacgtcgcggattcctcagcaatcgcaaagaccaaactgatgacaaagacaaagaatccggagcagttaaggcgggtatcaaagaactgacgcagaagattcatgatgccggatgtgagtatttgtgccaatatttctatcagttgtatcagaaaggcgagcgcatccgcagttgttataccgaccgtaaggagcactatgagcatgagtttgatgccatctgcgccaagcaacatttggatgaatccttggttcagcagcttcgaaaagccatcttcgagcagcggccattgaagagccagcgtcgcggtgttgccaaatgtccgtttgaaccatccaagcattgtgcgcctgtatcccatccgttgtttgaagaattcagaatgtggagttttatccgcaatatcaagatgcaaacgccggaggatgctgagctgcgcatgctgactaatgaagagatcgataaagtaaagcatctgtggttccgcaaatccaaagcgaacttcccgtttgaagacattgctaaaacgcttgcagggaaaggtaagtattgctattacaaatcagccgaggataagccctaccgcttcaactactatatggataccagcgttgcaggttgtccggtaagcgcgcaactgcgtgatgtttttggcgaagatctgcttaaggatagggcacaggttgattctatatggttagcattggatttcttcgacgacgacctgaaactccgtgagtgggcaatcaaacattataatctggctgacgagcaagccgatgcgtttgttaaaattcgtttgccgcaaggctacgcttcgctatcgctgaaagcgatggagaatattgttccgctgatgcgtgaccacggaatgaattatccgaatgctactctcttagccaaactgcgtgatttgacgaaagactatccgtttgagaaagatttcgacgaagatgtagaagcctatctgaaagccgatattgaggaatacctgactatcccaactgacaagaacggcaaaccgctgatgtcacgcgaggaacgaaaagaagcattggatgtgaagtggatgcagcactataacctatctgcaaaggagataaagaaactctatcacccctctatgattgaggaatatcgtcatgtggagcacaccacaaacggcgtatatcagttaggttctccgcgtatatctgcactcaagaatccgatggctatgcgttcgctcttccgcatgaaagcggtagtcaaccaattgctcaaggacggaacgattgacgagaacacaatcatacatattgagttcgcgcgagaactgaatgatgcgaatcggcgtgcagcattacgaagatatcaagccgccttgcgcaaagaacgcgaagatgcggtagaggctatcaaagaattcatcccaaatccgagtgatgatgatgtactcaaatacttgctttggaaggatcaggaaggcaagtgcgtttatacaggtaaaagcatatcgctgtccgccttgtataatggcaccgagtttgacattgagcacaccgttccgcgtagtatgggtggagataccacgcgcgagaacttgacgatttgtgatgcaaaattcaatagggagataaagaagaaccgtctgccgtcacaactatcagaacaagcacaagaattgctacaagccaatatccaaacatggaaggagaactgcgaggcgttagataagcaactgcgaaagatgaaaaatgccacatccggattgagcacaaaagaggcaaaagacagcgtgattgctaaacgtcatcttttggagatgcaacgggacttctggagaaacaagtacaaagcctttacaatcgaagagaaggatgtgcaaggctttacccgcaggcaaggaacggatatatcagtaatcagccgttacggtcggttgtatttgctcagtttgttcaatcgggtggatgtcgtcaaaggatcaatgactgctgcattccgcaagatttggggaatacagacagcttatgaaaagaagaaccgcgagaatcatgtgcatcattgtattgatgctataacaattgcttgtatgggtaagcgtgagtatgacgagctctccgcatattaccatgctgatgaagaaaataagtatcatagttccgacattctaatgccgaaaccatggaagacattcacggaagatatcaaggatattgagcaagagattcttgtggcgcattacacctccaacccgatgggtaagcaaacaaagaagaaacttcgtgatagccgtggacatatcatccgtgatgccaataaacaacctcgttttgcacaaggagataccgctcgtggagctttgcacaacgatatgatttatggaatgattgtcaatagccaaaatgtggatgacaagcataaagttggcaacttatgtgccgtaaagcggataatattaagttcagttgcttctaaagatgaagaaaaaatggcagccagcatcgtagatccgattattaagaaaacggtgaatgatgccagagcaaaatatggaagtttatctgctgcaattgaggctgaacaagaaaatggagacggttctatctggctaaacaaagagaaaaacgttaagattaagaaagtgcgctgtttccaagattttgccattaacgcttcacctatccgttcattgcgcgatcaatccaagaaagaatacaagcgtagccactattcaatgacaaatggcaacttcatgtctgccatctatgagggaacagatgcaaagggaaagaagaaacgttcgtttgttattatcagtttgtatgaagcagcacaggcctacggcaaacatgagcctttagtacccactgtgagcgaagaaggctatgcacttatcaagactatacgattaggggatttggtgctcttatacgagaattctccggaagagatatacactgcttcccaagaagaattggtgaaacgaatgtacgaaattataggaatgtcagattccaaaggtctgcaaattagactaaagcatcaacaagaggctagaccaaatggagagctacagcaaattaatggagcatttaaaaatggtgattcagcgccaatcagaatgcttttgcacactcaattcaacgctctcgtacaaggacaagactttgatatatccgataccggcaaaataacgttcaagtcatgctaa

SEQ ID NO: 69 - DNA, 3768 bp, Unknown
  Synthetic sequence or sequence of unknown origin
atgaaaaatatattaggcttagatttaggaaccgcgagtgtcggatgggctttaattaaagtcgatgacaacaacacccccatagacatacaggatataggagtacgaatcgtacccctagcagaaaacgaaggagacaagttcacaaaagggcagaacatcacggtaaacgccgacagaacaagagcaagaggggcacgccgaaacattgatcgatttcaactgcgcaggcaggctttgacagaggaactacgctccttagacatgttacctgacgagaaactaataaaactccccgtaatggaattgtggcaattaagagcaaatgccgcaacacaaaaagtttctcttaaagaacttggccgcatactttatcatctaaaccagaaaagaggatacaaacattctataactgaccagaacgactccaaacaacgagcatatgtcaaagaaatcaacaatcgatatagagagttgaaagagaccggactaaccataggacagtttttcgcacaaaaattatccgaaactgcagtctctaatgactgtaaatgtttttatgtttttagaataaaagatcaaatttatccaaggaaagcatatgaagaagaatacgaccgcattatgaaatgccaacaagaattttacccggaaatactgactgataacaaaatcaacaaaataaggaacgaaatcatatattatcaacgggacttacgttcttgcaaacatttggtttctatatgcgaatttgaaaaaaaatgcttctacgatgccaatggtgaagtaaagagaaacaagaaaggtgaaatcgtttatgatggtccaaaggtagcccctcgcacatctcctctatttcaagttttcaaaatttggcaatccataaacaatatcagatttcgcaatcgccaaaatgaatatctgtatataaccaaagaacaaaaacaaaacatagctgaaatcatggacaaacaggatgtcttaaaacttaaagacgtccagattacacttggcatcacatccaaatcaggatggtacagtgaccaagccatcaagaatggcattaaaggcaatacaacaaaacacgaaatactatcttctttatcatctctacaacagtcacaaatcgacaagataactcgttttcatcttgaaacagtagacactaacatgatagatgaagaaacaggcgaaattcttgtccgcataaaaggttcataccaaaaagaaccactttatagactttggcacatcatctattccattaagaatgacaaagaaagactcaatgccattgagaaattcctctatgaatttgacattatagataaagatgttgcagaaaaactgaataatatagattttgtaactccaggctatgcaaacctttcatcaaaagctatatgtaaaatcctcccatacttgatggacggaatagattatagcgattcatgtgaatacgttggctataatcactctggcagtttgacaaaagttgaaaacgaaaacagagaattacttgaccagattccagctattaaaaagaacgaactacgccaacctacggtagaaaaaattttgaaccaaactatcaatgtcttcaaccaaattaatgtagaactcaacaaaaaaggagagcgtattgatgaagtcagaatggagttggcgcgtgctttgaagcaaagtaaagaagaacgtgaagaaactgacagaggtattcgcaaacaacagaaattaaatgaagaatatgctgaaatattaaaaagtgacaatattcgaccaacccgaaatagaatattaaagtatcgtttatggagagaatcaaatgaaacctgtttttactgcgggcagcctgtaaaattcaatgagtttctgaaattcacagaaattgaacgtgaacacataatacccaaaagactaatatttgatgacagttttgctaaccaagtatgctcttgcaggaaatgcaatgctgagaaaggagggcgaactgcacttgattacatgcgtaacaaaccaaacttgcaagcatatcttgacaaggttaatcaaatgtttcaagacaaaaaaatcaacagcaagaaacattcacatcttctagcttcttatgatgactatcttgttcgcaaagcagaaggcaaagaaacgaaagatgatgttcgtatttgggaggagcctatagacaggcaactacgtctgtctcagtatatctctaaaaaagctcaggaaatactaagaacagcatgtcgcgatgttatagccacaagcggtagcatcaccgaattcttaagaaacacatggggatatggtacaatattgcatgacctcaactttaactgtttcaaagatgcaggactaactgatactataatagaagaggatacaggaagaactcgcgaagtcataaagaactggacaaaacgactagatcatcgtcaccacgcaattgacgccctaacagttgcgtgtacttcacgatctattgtccaacgcataaatacacttcatgcatccagagaagatttacgcaaagaaataaaagcatcaagaaaagattggcaagacaacaatctacttctgcaatggacaaaagagaagaaaccttttgacagacattttgttttagagaagattgcttctattctcgtttccatgaaggctggaaagaaagcaactgtgccgggcaagagaaaaatctacaaaaacggaaaaccgataacagtgcagactggacttaggattccacgtgggcaattacatgagcaaacaatatatggtgcaattacacaattcctcaaagataaaaagggaaatgtatcccaaaccaaagaatatgtagttcgttacaaaatgggggtaggctccatggggtatgtctttaatggcaaagaaacatgcgatgttgtatataacaagaaaaaagattgttatgaaataaaagatggcatagaagaagctataaactatattgtagataaacatatcagagatgtcgtaagaaaaagaatgaacgaagctttccccgaaggggagtcttaccgcactggagcagagaaagctctggctgaaggaagagtttataatggaaaagaacggtctcagaaagcattggaacaactaaaatctctgagtgaaaatccattatatacagacaaagagcataaaatagtagtcaatagtgtacgatgttttacaggacttcatgcagtacagccactgcgacgcaacagcaagaacgaagcaatatcatatgtactaacaaagaacaatcaccatgtagccatatacacagacgagaacggagattacaaagagatgatttatacattctggcaagcagtagaacgttccaagtacaaattacctttaatcatcaaggatgtcaacgcactttggaacgaaatcagacaaagagaaaaagatggagagcatttccctgacgaactaatacaatcgctacctatgcctaactggattttcatcgaaagtcttcagttaaacgatatgtttgtaatggatacagatgatgaaaccttcgaaaattatattgcgacaaataactacgaagaaataggaaagagcttgtatagagttcaaagcatatcaacttctgattatttcttcaggttacactcagacacaacttctattacgacacaagaagcagcattgagtaaaagattcataagaatcaagagttttaagtcatataaaaatcacaacccacataaagtacacatatctttgttgggcaagataatcaattaa

SEQ ID NO: 70 - DNA, 3294 bp, Unknown
  Synthetic sequence or sequence of unknown origin
atggaatataccattggtttggatattggtgttgcctctgtgggctgggcggttttggccgacgattcccagggggagccttgtcacattcaggatttgggcgttcgtgtttttgaagctgcggaacatccccaaaccggtgccagccttgcagcgccccggcgggaggccagaggagcccggcgaagaatccgccgcagacggcacagaaaagagcgtatcaaagctctgctggtcaagggtggtgtcattacacaggaggagatggaccgcctgttccaaaactccggttttgcccaggatgtctataccctccgggcggaaggtctggaccgctgtctcaccccggaggagtggacccgggtgctgctccacttgtcccagcgccggggctatcgctccaatagtacggcggaggcagccaaggataaggagaccggtgttctgaaacaggcactggcaggaaaccaggcactgatgcaggagaagggataccgtaccgttggcgagatgttctgccgggatgaaaaattcctatttgtggggccggacggaaatctctggcggaaaacccacaatacccccggggattacagctttaccatcacccgggatatgatacagcaggaggcggccgccctgtttgctgctcagcggaattattccaatccctatgcagacgaggcgttggaggagcagtataccaagattctcctgtcccagcggcattttgaccagggaccggggggcaacagcccctatggcaagggggatttgcggggcttctgtacctttgagccccaggagaggcgggctttcaaagccacctataccttcgagtattttaagctccttcaggacataaaccatatccgtattctgtctcccagcgagcccacaaggaagctgacccagccggagcgggagcagttgatttctctggcgatggagtccccctctttggattttgccagagtacgcaaagccctgaacctgccgccggagtgcagctttaatgtggttccctatgagagggataaggaggaggcggagaaaaagcggaagtttccccagatgcagagctaccatactctccgcaaagccctaaatacggtggagaaaaactacatcacccacctgacctatgcccagctggatgagattggcaccattctcagcttgtataaggcagatgacaagcggcaggaggggctggaggctctgggactgagccagcaggtgattgatgccttgcttcccctgtccttcagcaaggcgggaaacctgtccctcacagctatgaagaagctgattcctttcctggagcaagggatcaactacgatgaagcctgccgggaggtttacggagaccaccggcgcatggcagggggacagcgttaccggtacctgaccctgaacaaagagctgtgggacagtggagctctggacgccatcaccaatccggtggtgctccgggccctgtcccagactaccaaggtgctcaacgccatcatccgccggtacggaccgcctcagcgtatctgcatcgagctggcccgggagatgagcaataactttgaccagcggaacaaaattcaaaagcgaaacgaagagaatcgtgccaaaaatgagaagctgatggagcaaatccaaaagctgaagaatgcccgtcctacaggccaggatttggtgaaattccgcctgtatcaggagcaggacggtatgtgcctgtattccggcacccagctggatatggagcggctgtttgagccgggatatgtggatgtggaccacataattccctatagcatttcctttgatgacagcaaccgcaacaaggttctggtgctggccaaggagaaccggcagaaggggaaccggattcccatggaatacctggcctccgacccggagcgccgggagcggtatatcaccctggtggagcggtatgtccgggactatcggaagcggcagaagcttctgaaggaaaagctgacccccgaggactgccagggcttcaaggagcggaacctggtggatacccagtacattacccgcaccatttataacctgctgaaggattacctggagttttccccctctgcctccaaaacccctgtccgggcggtaaacggcgcagtcaccagtcatatgagaaggatgctgggacttaccaagcaccgggaggatggggatttgcaccacgccatggatgcggcggtggtggcggtgaccacccccggcatgattcagaaaatttcccgctatgcgaagcgtcgggagctggggcagaaggttgtaggcaagtatgtggacccggagaccggggagcttctttcccaggcagactttgacaaaaaatatgccccggaatttccggagccctatgacggtttccggcaggagcttctggcccggctctctccggacccggatacccggattcgggaactccacctgccccactatgatgacggaggggaaatccgccctgtgtttgtgtcccagatgccccgccggaaggtcaccggccccgcccatgcccagaccatccgcagcggaaagaaaccggggtatgctttgtccaaaaaggctttgacggagctgaagctggacaagaatggggagattgccggatactataaccccaaagacgatgtgcttctctataacgccctgaaagcccggcttcaggcttacaacggcgatgcccagaaagccttcgcccagcccttccacaagcctaaaaaggacggcaccgacggcccggtggtaaacaaggtgaaaatcctggaaaaatccagcctcaatgtctccgcctgcggcggcattgcggataacggcggcatggtgcgtatcgatgtataccgggtgccggaggatggatactattttgtaccagtttacacagcggatgtggtgaaaggggtactccccaccaaggcggttgtggccttgaaaggctatgacttttggaagcccatggaggcacagcacttcctcttctccctgtatcccggggatttggtgagggtggttgccaaaaagcccatcaatatgaagctgaaaaacaaaaatgccaagggcgagctggagcttctccggaaggaatggctggggtattatgttggcgcaaatattttcactgcatctattgccatttccacacatgaccggaaatatgtaagggatggtataggagtaaaaaccctgctgttgttggaaaaataccaggtagatcccctgggcagctatcaaaaggtacatctgccggagaagcggcaggatttttga

SEQ ID NO: 71 - DNA, 4014 bp, Unknown
  Synthetic sequence or sequence of unknown origin
atggtgcaagactattatttgggatttgatttagggactggttctttaggatgggcggttacagatgaaaattatgagattcttcgtgctcatggaaaagcgctatggggagtgcgcctttttgagagcgctaagacagcagaagaacggagaacattccgtacttccaggaggagattaaaccgcagaaactggagaatagaattgcttcagggtatctttgcagaagaaataaataagatagatgatggatttttcctccgaatgaaagaaagccgttatttgccggaagataaaaagaacaagtcaggaggtgttccccagcttccatatgcgctatttgtggataaaaattatacagataaagactaccaccgtcaattccctacgatttatcatttgagaaagtggttaatggaaacaaaagagattccggatattcgtctggtttatttagcatttcaccatataatgaagcatcgaggacatttcttattatctggagatattagggagattagagagtttaagaccacatttaagcagtttatagaggtggtaaaaaacgaggagctggattttactctggaaatagaggaagaacagtatccgaatgtagaacaaatactaaaaaataatcaaatgacgagaacagctaagaaaacagagctgataaaaagcttaaaagctgcttcaggctgtgagaaagcacttttaaatttgatttccgggggaacagtaaaattaagtgatatttttggcgataagcagcttgatgaaagtgaaaggccaaaacttgctttttcggatatcggatacgatgagtatgaaggagaaattcaatcggtcttaggagagcagtatattattattgaacatgcaaaagcggtatacgattgggccgtattggcggatattttagatggccaagactccatttctgctgtgaaagcagctttatatgagaagcataaggcagatttggtgtatttaaaaaagttggtaaaggaaaatttgcctgctaatatatataaagagatttttacaaaaacagaagagaaaatttcaaattacagcgcgtatattggaatgtcaaaaaagaatggaaaaaagcaggaaattcaaggaaaacgatgcagtaaggacgatttttacaagtatttaaaaaagcaagttattgagcgtattaatgatgaaaaagtcacggaatatttaaaggaggagatagacagaggaactttcttgcccaggcaggtaataaaagataatagtgtgattccccaccaaatccatttatatgaattaaatcaaattttatcgaatttacaggaacatatccctcttttaaaagaacagggagaaaagattagaaaaatttttacatttcggatcccttattatgtgggcccattaaatggggttgaaaaaggaaaagaaaggaccaactgggtaaaacgtaagggcgaagggaaaatttccccctggaattttgaagaaatcattgatgtggaagcaagcgctgaacagtttatccggagaatgactaataaatgtacatatttaatacatgaggatgtattgccaaaatattcactaaagtacagcaagtttatggtattaaatgagttgaataacctgcggttggatggagaacccatttcagttgaattaaaacagaaaatttatctggaagtatttcaacgaaatagaaaagttacccagaagaaacttaaggactatttgatacgggaggggattgctgcaaaaactgtagatattacaggagttgacggcgattttaaaagctcattgacagcctaccatgattttaaggagaagcttacaggcgttaaattagaggaagaggaaaaagaatctgttatacttaatgttacattatttggagatgataaaaagctattaaaaaagagattaaaaggacttttgccccaattgtctgacgggcagcttaccagcctttgcaatctcccatatagaggctggggacggttgtcagaaaaatttttagactccatcgtagctcctgcgccagaaacaggagaagtatggacgattctgcgtgggctttgggaaagcaatgataatttaatgcagctcttaagcgaaaagtattattttgctgatgcaattgaagaggaaaatggaaaggaaggatgtaaagaaatttcatatcagttaatccaggaattatatgtatcgccagcagtgcgccgccagatttggcagacacttttaatcgtaaaagaactatgcaaggtactaggagggccgccgaaacgggtatttgtagagatggccagagaaaagacagctaaaggaagaactcagtcaaggaaaagccgtctgttggagttatataaaaaatgcaaaacagaagaaaatgagtgggttgaggaactgaaccataccgatgaatctacattaaggggcgataaactctatttatattatgttcaaaaaggccggtgcatgtattctggtgagcggattgaactaagcgagctatgggataatcagaaatatgatattgaccacatttatccacaatcaaaagtcatggatgacagcctggaaaatcgtgtattggttaaaaaagtatctaatgaagaaaaatcggatcgctatcctatttcggaaaatatccgaaagaaaatgcagccgttttggaagtcgcttctggatgggaattttattactaaagaaaaatatgaaagattgattcgcgcgacagaatttgagcccgaagagctggcaggatttattgcaagacagctggttgaaaccagacagggaacgaaggcagtggccagcatattaaagcaggtgctgccgagcgcagaaataatctatgtaaaagcgcctactgtatcgcaattccgtcaggacttcaaatttgtcaaggtgagggagatgaatgatcttcatcatgccaaagatgcatatttaaatattgtagtaggaaatgtttattttgttaagtttactaaaaatgcctcctggtttataaaagaacatcctggcagaagctataatctgaaaagattgtttctggcagatagagtggagagaaatggcgaaattgcatgggttgcgggagaatcagggacaataggcaaagtgaagcgcactatggaaaaaaacaatattttagtaaccagacgctcttatgaggtgactgggggcctgtttgatcaacaactgatgaaaaaagggaaagggcaggtgccggttaagggaagtgatgagcggcttagggatcttcagaaatatggaggttataataaagagtcaggcgcatattttgttttagtggaatcggaagacaagaaagggaggaagatccgaaccatagaatatattccgattcgtttgaagagcaaaatgaagcaggatgaagagctgtattgttatctggaggaacagagaggattgaaaaatcctaaagtattgcttaataagataaagacggatactttgtttcaggtagatggattttatatgtggctatctgggagaacagaaaatcgattgatttttaaaggagcaaatcaattgctgcttcctccaaaaaatgtggaaactctaaaaaaggtattgaagtttgttgctcgaaaaaaggagaataaagaattaaaaattttttcagcggatagaattgaaaaagaaatgttacttgacctctatgatacttttctgtctaaacttcaaaaaacagtttatggaaaacgtttgggagcacaggaaaaaacactttctgacaaaagggatactttcagagacttagagatagaagaacagtgtatagtgctttctgaaatattacatatgtttcagtgtcaaagcggcgcttcaaatttgaaactgattggtggtcctgaaaatgctgggagtttaaagattaataatgatataactaagtgcaggcaaatcaatattattaatcaatcccctacaggtatttatgagcaggtgattgatctgcaaaaagtatga

SEQ ID NO: 72 - DNA, 4047 bp, Unknown
  Synthetic sequence or sequence of unknown origin
atgagcataaaaagtgattattttttaggacttgatattggtacggattctattggatgggcggtaaccgacccagaatatcacatattgagacgaaaaggtaaagcattatggggaataagattatttgatgcggccaatacagcggcagaacggcgaacatttaggacaagccgaagaaggattcagagaagacgacagagaattcggttattgcaagaattatttgcagaagaaatggtaaaattagacccagggttttttcagaggttgtcagacagcgcattttggcaggaggataagcaagagcagcaaatttattcactttttacttgtgaaaattatacagatgttgattattacagagaatatcctactatttatcatttgagaagtgcattgattcaggaaaagaaggaatttgatcttcgtcttctatatcttgctcttcaccatttgatgaagcacaggggacatttcctgtttaatgggagtattaataatgtgacgtcatttcatacgacgtttcagacgtttgcagattgtctttatgatgagtttgatatagaactggaatgtgattccgaagatagatttgcagaaattttaaaggataaacatgccagaaaaacaggaaaatgttctgaattagagataatctgtcatatagaaaaatcaaataagcagctaaaagaactttttaaattaattacaggaatgaaagctagtttgagtgttgtgtttggtgatgatgaattagcagaaatagaacataataagattagtttttcagagagtagttatgatgaagtacgtcttgcattggaggatgagattcaggagaggactggtatactggatatctttcatgcagtttatagttgggcgattctcgcggatattttagaaggcggagaatatgaggggaattcttatctgagcgttgcgaaggtaagcacttataaaaagcatggtgatgatttgcggttgctaagaacactggttcgggaatattgtcctgatcattacaaatctttcttttccgtatcagggaaggataattattgtgcatatgcgggtactttaaaaaagaatggaaaaaaacagccgattaaacgttgcagccaggaagatttttataaagcgttaaagaaattgctgaatcagatgccgacagatcaaccggaagtgaaagacatcttcatcgaaattgaaaatggtacttttttgccgttgcaggtaagtaaggataatggagtgataccttatcaggtaaataagatggaattagaaaaaatcctgcagaatgcagaagaatatttgccatttttaaaaaatatagatgaagaatgtggaaaaacggttagtaagaagattatagatctctttgagtttagaataccatattatgtagggccgcttaataccgctaaaggagaaaactgttggatggtcagaaaagaagcggggagaatatatccgtggaattttgatgaaaaggtagacagagatcaatcagcagaaaaatttatccgtagaatgacgaatcagtgtacatatctaatacatgaggatgttgtacctaaaaattctttgctttattcggagtttatggtgctaaatgaattaaataatgtaaagattcggtctgagaagctgccggtggagttaaaacaggcaatagtattggatttgtttaagaaacaaaagcaaataacagggaaaaaacttcttaattacttgaatgcaaatggatatgatgtgaaaaaagaagatttgtctgggtttgacgggaactttaaagcatctctgtcatcatatcttactttgaaaaaagtatttggggaagaattagataaatatagtgtgcagcagatggcagaggatattatcttgtggattactctgtatggagatgatcagaagatgttgcgcagggtaattcgaaaacattatgaacagcaattgagtgaagaacagattctttccttatcgaaattgaaattccaaggctggggaagattatccagacgatttttgagtgaaatggaaggagttgattgtgagactggtgagtgtatgacggtcatgcaaggacttcgtaatactcagaataatctgatgcagcttctaagtcagcagtttacatttatggaattgattgaggaagaaaatgggaattattatgtagatgagattacatacgataatcttgtgaaagatatggttatatctccgtcagtgaagagagcagtctggcagacagttcagattgtggaggagattaagggggtaatgggctgtcagcctaagaagatatttgtcgagatggcgcgaagcgatgaggagaaaaagcgtactgtatctaggaaagacaggttattagaagcatatgatgcgatcaaggatgaggctcgtcaatggcaggaagagttgcaaaagtattcagatggtgattttaaggctattaaactttatctgtattatacgcagatggggcaatgtatgtatactggaagaaagatagatctgtcacaattaaatgatgcgacggtatgggacagagatcatatatatccacagtccaaaacaaaagatgatagtctggataatctggtattggtagaccggagtgtgaacgctaagaaaagtgatgggatgctatcacctgagattcagcagagaatgcgggctacttggaaatacttaaaagagaaaaagttgatttcagagaagaaatatgagcgtttgactagggtctcaccacttacagatgaggaattggcaggttttattaatcgacagttagttgaaacacgtcagtcttcgaaagcagtagcaacacttttgaaacgagtatatgatgaagcggagattgtctatgtaaaagcggaagctgtttcaaattttagaagagataatttggattatattaaggtgcgtgatctgaatgattatcatcatgctaaagatgcatatcagaatattatagtggggaatgtttttcatgagaaatttaccagcaatccgcttcgttggctgaaaaataatcctaatacgaaatatagtttaaatcagatgtttaattttgatttagagaaaaatggggtggtaatatggaaaagagggaaggatggaagtattaaatgtgttgaagaaacattgaaaagaaatgatattctttttacacgatatgctttttgtaataagggtggtttttttcaccagatgttaacggcagctccagaagataaaacgaaagcaaagggacttgtaccaataaaaaaaggtatggaaacatggaaatacggggggtatacatcagtaactccgtcacattttatgttggttgcttcgaaagataaaaaaggaaaggagataagaacgattgagacggttccgttgtataggtggaaagagttcaaagaaaatccagatgcattactccaatattgtagagagttctatggtttgaaagagccaaaggtgctgataccgtgtattaagaagaatgccagattagtcgttaatggatttccaatgcatttgaaagggagtacaggaagacaattgattttgcagggagcggttcaattatgtctggataatgaaaatataaagtatctgaaaaaagtcacaaaatatttggaatgtaatgcacagagaagagataaaagaacactactggaagtaagagaggttacaggaattaacaaagaggaaaatatacaattatatgatgtgtttgttgataaattgagtaacacaatatatcagtatcgtccggcgaacccgaaggatgttcttataaaaggaaaggataagtttgtggagttgaatttggcagaacaatgtgtagtgttaggagaagtattgcatttatttcaatgtaaactaattggagctaatttgattttaataggagcttcacaacatacaggaatgataactaacggaaaaaaaattagcaattgtatttctataaaattgagtagtcaatctgtaacgggtattaaggaacgagtaatagatttgttaaatatatga

SEQ ID NO: 73 - DNA, 4059 bp, Unknown
  Synthetic sequence or sequence of unknown origin
atgtattacatggggctagacttggggaccagctcagtgggttgggcgctgaccgatgagaattataagatagtgcgcagaaaaggcaaggatatctggggggtacgtttatttgatgaagcaaagacagccagtgacaggagaacttatcgtatatcccgcaggcgcagggcccgcgaggttgcccgtatcggcgtattaaaggaatatttcagcgaagcgatagaagaagctgaccctggtttctatcagcgcctggaggaaagcaaatatcatgatgcagacaagagagttaccggaagagatgctctctttcatgacgctgattttacggacagggactattttgctaaatatccaactattgcgcatttacaaaaggaacttatctgctcccgggaaaaacaggatgtccggttagtatatctggcggttttgaatctttttaagcacaggggacattttctgaacggaggactgggagaggtagcagcggatgcggtcagtctctacagtgattttagaagaatatcctcggatgagtttgacataatctatccggaagagtatcaggtgcaggaaatagagcaagtcattaataatcgtgccatatcgaaaagagaacgggctgaacggttggcgggctgctggaagatcgctccgtctaaagataaacgggcgtatgagattgtaaagatgctgtgcggattatcaggcagattggcaaatatttttgaaaaggacatgctcgccggagatacgggaaaattacaactttcttttcgtgatgcgaaatatgaggagaagtttgacgaaatagcggagtgtgggagtccgcaggtgatggacctgattgcttccgcaaagaaattacatgactcctggatgctaaatgagattatgaaggggcagacatatctatgctttgccagagtggcctcatatgagaagcatcgagacgatctcaggaaattgaaggaggttctcaagaaatacgcgccggaagagtatgaatattgttttcggaaaatggaaaatgacaattatagtggatatatcgggtcagttaattgtaaaaaagtgaagcagcggagaaatagagaagcctcatcggaaggattctttaagtaccttcggaaggttctgacagacatgcccgagaatgatgatgtgcaatatcttctacatgaattggagaatgagtcattgctgcccagacagctaaccgccgataatggcgtcattcccaatcaggttcacactgcggaactgaaagccatccttaaaaatgctcaggaataccttccctttttaaaaatgcaggatgaaacaggtcttacggtcagcgaaagaatcgtgcagttgttctcatttcagattccgtattatgtgggaccattacatatagacggaagccgggaggcaaataaatgggtggtcagaaaagagcctggaaaagtttacccatggaatttaagtcaaaaagtagacttacagcagacgcgggaagaatttatactccgcatggtgcggcgctgcacatatatggcaggggaaaatgcattgcccaaaggttctttactttatgaaaaatttatggttctcaatgagctgaatgttttgcgcataaacggagagagaatctctgtacaggataagcagaatatttataatctttatttccgcaaaggaaagaaagtaagcaggaagaagattttatcttacttccagtcccagggggtgattggaacatccgaagcggatgtccttacgggagtggaagatagttttacgtgttccctgacatcttatggtcgattccgggatgtggtgggagatgctattgacacatgggattatcaacagatggcggagcagattatcttttggggaacagtttactccggagacagaaatttgttgatggaactgattacggagaagtatggttcggaaaataagtatgcggatttttgtaaaacgcgttctgaaggtatttgcctgacaaaagaacagattaaaagaatagcgggttttaagtggcaggattggggaagactgtcccggcagttcctggaattggagggatgtgagaaagcaacaggggatgtgcgtactattgtctcggcactttgggagaccaatcacaatctgatggaattgctgagcgatgaatatacatatagggatgcgctggcagaaaaagctgaaaccaaggaaaaacttctcacggaaataagccatgaggatttggaggaatactatttttcggccccggttaagcggatgatctggcagactatgttgattttaaaagagatcagaggggtgatgggtgagaacccggccagaatttttgtggaaatgccgagaacggatggagaaaggggacagagaaccgtttcgagaaaaaagaaatttgaggaattatataagcaatgcagaaaagaggaacggtcctggcaggaggagatcagccggtatagtgaaggagaattcaggagcaaaaagctgtacttatactatttacaaaaaggacgctgcatgtattcgggagaacctattgctatggaagatctcttcaacgataatctatatgacatagatcatatttatccaagacattttgtcaaagatgatagtctggataataatcttgtgttggtcaaaaagcagataaacgctcataaaagtgacagttatcctctggagagagaaattcaggacaggcagcgcgttctatggaaagccttgctggagggaggatttctatcaaaagagaagtatggcagattgactcgcacctgggaattttccgatgaggaactggcgggctttatcaacaggcaaattgtggagacggggcaggctacaaaggctgtggctcatttgctggaggagttactgccaggtacggaggtggtctatgtcaaagccggtaatgtttcggatttccgtcatcagtttaatatgctgaaagccaggtctgtaaatgactttcaccatgccagggacgcctatctcaacattgtggtagggaacacatatcataccagatttacgcgtaatcctttgttgtttatacagcagaacgggaaaggccgttcataccatatggataaggtttttgcatttgatgtccgcagaaatggagaaaccgcatggacagcggggaaccaggggagcatagtcatggtaagaaagatgatggggcggaataccccgttggtgacaagaagagtgtatgaggtacatgggggaattgcgaagcagacgatctgttcagccagagaggctaagaccgaagggtatataccgattaagggtaaggatgaaagacttgcagatagaaccaagtatggcggatatggcaatgtcacaggtgcttactattttttggtggaacataccagaaaaaagaaacgggttcgcacgctggaggtggtacctctatacctgaaagaacggttaaaaggcatcgagcagttggaggcctattgtgaatgtcagttagaattgaaacagccaaaaattgtgttgtctaaaatacgatttaagacattgatctgccgtaacggtatgtttttgcggataagtggacgcacaggaagttatattacggtggataatgctgtacagctttgcctaggaggatcttgggagaattatatcaggcatttggagaattttaagggagcaggaaaggaatatgacagcaggggaattgttacctgccaggcaaatatggaattatatgatattttattacggaagcatacccagtccatataccgtgaaaggcccaattccattgcgcaaaaaatgacaggcggaagagaaaaatttgaaagtctaggcattgcagaacaggccggcgcattaatagaattgctaaaggggactcaatgcgcaaatctgtctatagacgataaggccacagggatcaagtcatctttcatgaaagtcaataatgatgtcacccgcgcggaaacgtttttactaatctatgagtcagttacaggaatatatacaagagaaatggatttacagactttatga

SEQ ID NO: 74 - DNA, 4395 bp, Unknown
  Synthetic sequence or sequence of unknown origin
atgaagaaatactttttagggttagatgttggaacagaaaacattggttacgcacttactaaagattatgaagttatgcaagtaaatgggaagcgcaccatgggtgtactatcttttgattctgcaaatactgcagtggataggcgtacatatagggcgacaaggcgtagattggataggcgccgttatcgtattgcgttacttcaagaactgtttaatgatgaaattatggctaatgataaaaattttctaaggagacttggggataatgatttgtaccttgtggacagaaatgtcgaaggtaaatattctttattcaatgatactgattttaatgatatagtgtattataagcaatatccaacaatatatcatttgcgtgaaaaacttatgatggaaggtacagatgatatccgattgttgtatctagcaattcaccatattattaagtacagagggcattttttacttgctggggaagtttccacaaatgaagtcggtggcgtaaaacaattggaagaattgattaataaattaaatagtaaactagatgaaaataatgatgaaaataagaataatgataatacttgtttttttgacaagtttgcaacaacggctttgagtgatgtgaaagatttgatttgtggcactggcgacattacaaaaaatatgctaaatcaaattacaataggcaaaaaatacatttcaaagagagataaaaaaaataagcttaatgaattgtttggtgtttcttctagtaaaacatcaaaaaaaattatagatattgtaatgggtggtaaagttaatttaacagagttgtttggcaaagagtactatgaaaaagaagaagtcaagggttttacaatggcagaagagtgggagtcaattgaagatttgcaattgattaaagataatattttgcatattgatattattgatacaatcaaacaaatttatgattgggtaacacttaatgaaatgcttaaaggtaaacaatctttgtcaagtgcaatggttgaaatttatgaaacgcataagcaagatttgcacgatttgaaagaatttataaaagattatgctccaaatgattatgagagagtttttggagaaataaaaaatgaaaaaggtaaaatagataatagtatttgcaactatagctgttacataggtggtggcaggtataatggggataagataggtgcaaacggcaggtatggaagtacttgtacacaagaagatttctataaatttataaaaaagattattgaaagcgttacagttgaggaagcaactgctttacgggatgacttgcttgaaagaatagctaataaggattttatgccaaaaattgtttcaaaaaacaattctactataccatatcaactaaatatgatggaacttgatgggattttagataaggcaagacaaaatccaaaatttacttttttgaatgatgtagataatggttggactattgctgataaaataaaatcacttttatcattcagagtgccatattatgtgggaccagtgaaggaatatgaagataatgataacaacaaaaggtatgcttgggctgtaaggaaagagtccggcagaattactccttggaattttgatgataagattgacaaaaaacaaagtaatgagatatttattagaaggatgacaaacagatgcacatatttgaaacttgctgataccttgcctaaaaattctattttgttttcaaaatttatgtgtctaaatgaaattaattctatgaagataaatggtgatgctatttcttgtaaagagaagaaagcaatttttgacaatgtattttgcaagaaaaatccaacaattaaaaatatcaaaaagtatttgatagaaaattttggatatgaaaaaggtatagtcttgagtggtattgataatgaaatcaaatcaagtatgaaaacctatattatatacaaaaataagcttggtaataaggttgatgcagatcctaatatgattgaacgaattatttttttgtcaacaattcatgaggatagccaaatgttggaaaaatcgattcgtgaagaatttggtgataaattgactgaagatgaaatcaaggctattaaaggtttcaagtttaatggttggggtagtttgtcagcagagtttttgacaggatataaaaataatggcatcaaattaatgtttgatggagaaatgcttgatattattgatataatgtatgagtacaacttgaatttgcaacaaattattttcaatgaaaagtgcaatttttcagaagcattagaggcatatgatttagaacataacattgtagaggactcaaatgtaagttataataaagacatcgcggattatccttgttctccatctgtcaaaaagtgtgtttggcaatcatttaaactggtcaaggatattgtgaaacaaactaaaattgtgcctgatgtagtatttattgaatcttgccgtgaaaataatgattttaagaaaaatcaaagaacaagcaaaaggcgtgatatgattgttgcaaattatgatgaagcacgcaagataattaatgaattacaaagagataaaaaggcagaattctcaattcaagagcttgaaggacttagtgaagatattgattattgccaaaagactctagataattattctgatagcgaattgaaaaaagaaaatttatatttgtactttatgcaacttggaaaagatatgtacactggcaaagctattgatttgaatcaagttttgtttggcaatatgtatgaccatgatcatattatacctcaggcagtgattaaggatgatagttttacaaacttagttttggttgctaaaaaagaaaacgctgagaagtcaagaacttatccactagaatctcaatttagacaaacaactttgtggaaaaaactatacaaaattgggttgctaagtaatgaaaaatattcaagacttatccgtcagacaccaattactgatgaagaacaagaaaagtttattaataggcaattggttgaaacaagtcaaactgttgtattattaagggatttgttgaacagatattttgcgagcaaaaatgttgaagtagtgttgacaaaagcaggtaatgtatctatgtttagaaaagaatttgatttaacaaaatcaagagaagttaatgattttcaccatgcttgggatgcatatttaaatattattgttggaaatattttgaataaagagtttaatcataattggttcattaggcaagataatggaaaagataagtcatataacttcttgcgtgtactaagaaaacaagcaactgcgaataacaatgaaatactgaatattattgagacaacaatgaataatatcgattttcaaatggttaaattgccagaagagaaaaaaggcaacttctattcagaagtgttaaaaactcatgaaaatgataaagatagcagtttaataccaatgtgcgataacaaaattgtgggtggcaaagagattcatcctaaatgcgatacaactaagtatggtggttacaaaactgcaaatactgcatattttattcttgcggattcgattgataaaaaaggtgcagttcaaagaaatattgttgctatatctatttttgatgatgcgagaattaaaaatggtaaaataacttacaaagaaatttttgaaagaattggcttaaaggatggtaaactcgcaaatgttgagggaatgaaagtgcctatcataaaaacgggttctttgttagattttggtgcttattgcttgagattagcaggaatgacagggaatcggttaacttttcataatgcaaatcaattatttgttagtaaagatcaaaataggtatatcaaagaattgggcatattggttgacaaagttgttaaggaaagcaaaaaggatactaaggaagataagaaagaggcaatggcactagaaattattgaagaaagtattagacgaaaaaataatcctgacaataaaaattccaacataattgtagtcaataggaaagataatttgaaattgtatgatttctttgtgtataaattgtcacataatccatataaagatatacctacatatagcagtttgcttgatattttgcaaagaggaaaagaagactttgaacaaaaggagatttatgctcaagtactcctattatttaatataatcaaagctttccaatgtaatgcacaaaaagttgatgttagtgctttatcttatgttaacaagaaaggtattgctacaaaaggtggggctggacaatgcagtattgcaataaatagtgatattactgaaattgacaaattgattttgattaatcagtctatgtctggactaaaagaacaaagaatacagcttaatttgaaaaaggtggacaaatga

SEQ ID NO: 75 - DNA, 4029 bp, Unknown
  Synthetic sequence or sequence of unknown origin
atgtattatatggggttagacttgggaaccagttcagtgggatgggcattgacagatgaggattatcatattgtgcgtagaaagggaaaggacatttggggggtacggctgtttgatgaggccaggacagctgttgacagaagaacaaatcgtatctctcgcagacgcagagccagggagattgccagaatagggatgttaaaggaatttttctgtgaggcgataggggaagttgatccaggtttttatcagcgccttgaggaaagtaaataccatgatatggataaaagaatagagggaaaagatgctgtctttcatgatgttggtttttcagacaaggattattattcaaagtatccgacaatagcccatttgcagaaagaactgatatgctcagaagaaaagcatgatgtaaggctggtatatttggctatactgaatctctttaaacacagggggcattttcttaatgcgggtcttggagatgtgggggcagatatactcacgctatatagcgaatttcaaagaattgccgcagatgaattcggtatttcttttcccattcaatatcagaagcagaatattgaaaaattgatggataaccgaaccatatccaaaaaagagcgggccgagcagttggccgtcctatggaaagtcattcctgcaaagaataagcaggaatatgaaatcatcaagatgttgtgcggattatcggggaaaatggccaatgtttttcagaaagatatgttggctggtgagacaggaaaaatacaggtgtcttttcgggatgcaaaatttgaagagaaatttggtgagctatccgagtgtggttattcacagatgacggacttgattgaagcagcaaaaagattgcacgactgctggttgcttaatgagataatgaaagggcagccctatctttgttttgcaagagttgcctcttatgaaaagcataaagacgatttgaagatattgaagaaagtattacaaaagcatgctcctgaggaatatgagtattgctttcgaacaatggagaatgataattatagtggctatgtgggatccgttaattgcaaaaagcagaaagtacgcagaaacagaaaggcttccccggaagagttctttaaatatcttcgaaaggtgttgaagagcatacctggggatgaagatacacaatatcttttacatgaactggaaaatgagtcattgcttcctaaacagctgacagctgataatggtgtgattcccaatcaggttcataccgcagaactgaaagccatattaggcaatgcgcagaaatatctcccttttttgcagcaaaaggatgagacagggcttacggtgagcgaaaaaatagttcagttgttctcgtttcagattccatattatgtggggccattgtacataaacggtggtgacgagacaaacaaatgggtggtcagaagagaggatggaaaagtatatccctggaatctaaagcagaaagtggacttgcagcggacgcgggaagaatttattatgcggatggtgcggcactgtacatatcttacaggcgaaagcgctttgccaaaaggttcgcttttgtatgaaaaatatatggtgctcaacgaactgaatgttttgagaatcaatggggagaggatatctgttgaagataagcagaatatttataatctgttttttgtaaaaggcaagaaagtaagcagaaagaagattttatcatattttcaatctcagggagtgattggagagcaggaagaggatttactgacagggatggaagagagttctatctgcgcgctgacttcctatgggcgattcaggaatgtagtaggcgatgcgattgacagttgggagtatcagcggatggcagaagagattattttctggggaaccgtttattctggtgacaggaaacttatgacagaattgattacggagaaatatggcccggaaagtaatatggcatatttgactatagaacagattaaaaggatttccggatttaaatggcaggattggggaagattatcacggcagtttttggaactggagggatgcgagaaagcgacaggggaggtgcgcacagttatttcggcgctttgggaaaccagcagcaatcttatggagttattaagcgacagatatacttatctggacagattggcccaaaaaacagaaaaggcggacaagcttttggaggaggtcaggtatgatgatttggagggatattgtttttctgcaccagtgaagcgaatggtgtggcagaccctgcttataatgaaagaagtaacccaggtaatgggagaaaatccgggcagaatttttgtggagatgcctcgggcagatggagaaaaagggaggaggactgcttccaggaaaagaaaattcgaggaattatataagcagtgcaaaaaagatggacatgactggcagaaagagattagccaaagaagtgagggggaatttcggagcaagaagctatacttatactatttgcaaaagggacgttgtatgtataccggagaacctatttcgctggaagatcttttcaatgataacctgtatgatatagaccatatttatccaaggcattttgtgaaggacgacagcctggacaacaatcttgtgttggttagaaagcagattaatgcccataagagcgattcgtttcctctggaaaaggaaatacagaggaagcagcatactttgtggaaatccttgctggacgcagggtttctctcaaaagaaaagtatggcagactgacccgtacctgggaattttccgatgaagaattggcggggtttattaacaggcaaatcgtagaaacgggacaggcgacaaaggcagttgcacatttacttgaggaattgttgccagatacggaggtggtatatgttaaggcaggcaatgtgtccgagttccgccaccggtttgatatgcttaagtccaggtcagtgaatgactttcatcatgctaaggatgcttatttgaacattgtggtaggtaatacatactatagcaaatttacacgaaatcctctttggttcatacaaaaaaacgggaaaagccgcccttatcacatggataagatatttgaatacgatgtgcaaagagatgggaagtgcgcgtggacagcaggcaatcagggcagtattgtcttggtgaaaaagatgatgggcaggaatacgcctcttgtgaccagaagagtatatgaaatgcatggggggattgccgagcagaccatatattctgcgagggaggcaaaaccggggagctatattccggttaagagtaaggatgaaagattggcagatgtcatgaagtatggaggctatagcagtgtaacaggtacatattattttttggtggaacatatacggaaaaagaaaaaggtgcgcactttggaagcggtgccgctttatcttaaggacaagttgaatgggattgagcaattgacaatttattgcgaatgcgagttgggactggaagaacccagaattattttgcctagaatacgatttaagactttgattaagagaaatggcatgctgttaagaatcagcggtcgtaccggaaaacgaattatggtagacaatgcggtacagctatgtctgggaattcattgggaaaattatatcaggcatctggagaattacctcgtctcaggaaaagaatctgataatagaggaatcgtgaccggtaaaaagaatatggaattgtatgatattttgcttaagaagcatacccaaaccgtttatcggaacaggcccaattccgttgcgcaaaaaatggcggatgcgaaagacagatttgtaggtcttgggatgacggagcaggcaggggcattgattgagttgttgaaagcgacccaatgttcaaatctcaccattgatgacaaagcaaccggtataaaggcatctcctatgaaaattaataatgaaattaccagtgcggaatcattttgcctgatttacgaatccgtgactggaatatatacaaaagaaatggatttgcaggctttatga

SEQ ID NO: 76 - DNA, 3279 bp, Unknown
  Synthetic sequence or sequence of unknown origin
atggcatatggcataggcttggatatcgggattgcttcagttggatacgctgttgttgcgctggatacggatgaaaatccgtggggcatcatcagaatgggttcccgtatctttgatgcggcagaaaaccccaaagatggtgcatcgctggcattgccacgccgtgaagccaggagcacaaggagacgtttacgccgccaccgtcatcgcattgaacgcattaaaaatttatttctgagaagtggccttttgacgggtacggatttagattgtctttatcagggacaactggaagatatttatgcattgcgtgtcaaagcattggatgaaccggttggaaaaaaagagcttgccagaattttactgcatttggctcagcggagaggatttaaaagcaaccgcaaagctgaaagcaaggaaaaagaggctggtcttttaaaggcagctgtcagcgaaaatgaaaagaggatggccgaaaatcattaccggacagcaggagaaatgtttttaaaagaccctgctttttcccaatacaagcggaataagggaggcgtttatcttaccactgtccaacgttctatgattgcggaagaagcggatatcatcttacaaagacaatcggaattaggcaataaaattatcactcgtgatttcaaagaagaatatttctctatactgttaagccaacggcaatttgatgaaggacctggcgggaatagcccgtatggcggcaatcaaattgaaaaaatgattgggatttgtacctttgaggatggtacgaacggctttccggcagaaccgcgcgcagcgaaagcctgttactcttttgaatattttaacctgttgcagaaagtcaatcatattcgcctgctttacaaaaatgaaagcaggtttttagatgatggacagcgaaagaaagtcattgaattggcaaaaacaaaagcagatttgaactattctcatatccggaaagagctggggcttggagaagaaatcaaattcaatatgcttgtttataatgctgatgatatagaaaagaaaacaaaatttaattttatgcctgcgtaccatcaggtaaaaaaagctttgaatgctgtcgcaaaagggcatattgaaagctacagtactgaattgttagacgaaataggtcgcattctttcaacatataagggtgacgaaaagcggacagaggaactcattaaagctggtattgctataccggatgtagatgaacttttgaaaatcggcgggttgagcaaatttggacatctttccttaaaggcattgcgtaaaattattccgtttcttgaacaggggatgagttatgacaaggcttgcgaagctgcagggtataatttcagagcgcataataaagaaaaaagcatgtatttgcctgctaaagccgaggaactgcaggacataacgaatcctgttgtacgcagagctgtagcgcaaacaattaaggttgtaaacgctattattcgcgaacaaggagaaagcccgatttatgtcaatatcgaacttgcgcgggaaatggcaaaagattttaaggaacgcgcgaaattgacgaaagagaatcatgagaaccaagcggaaaatgaaagactgctggataggatccgcaaagaatttggaaagtccaacccaacgggaatggatttggtaaaactgaaactttggaaggaacaagacggcattagtccgtattcacgaaaaaccatagaggtaacccgtttatttgagcctggttacgttgacgttgaccatatcgttccttacagcatcagttttgacgacacctataaaaataaagtgcttgttatgtcaagtgaaaacagagaaaaggggaacaagctgccgattcagtatctcgctgcaaagtttgggaaggacgctgttgaagcgttcaaagtttgggttgttaatagcgttaagaattacccaaaacggcagaagttactcaaagaaaaaattacggaagaagatattacaggctttaaagaacgtaatttgcaggatacgaagtatatggcaagagttctttataattttattaacgacaggctattgtttgctgaatctgaaataggaaagaagaaacgggtccgtgcagtgaatggcgctataacatcttatctcagaaagcgttggggtattaataaagttcgcgaaaacggagataaacaccacgctgtagatgcgttggtcattgcgtgtacaacggataaaatgatacaggaaatctccggatatgcgagagggcaggagcttgaatatgagcctatggataaggagtcattgctggtagataaatcaaccggtttgattttaaaacgttttccatatccatgggaagatttcaggaaagaactgatggcaagaatgtcggatcagcctgccgaagccctgcaaaaattacgtctgttgtattatcaggataaagatattactgcaataaagccaatctttgtttcccgcatgccacggcacaaggtgaccggcgcagcccataaagcgacggttaaaggtgcgcggcatctggacgaaggaatagctttgtataagacggatctagtaaatttaaaactggataaaaataccggtgaaattgttgattattacaatcctgaaagcgaccggcttctttataacgccttgaaaacccaactgcagaaatataacggtgacggcaaaaaggcttttgcggaaccgttttataaaccgaaggcagacggaacgccagggccgttggttaaaaaggtaaaatgttttgaaaagacaacgttgaacgtgttggtggaagatggcacaggtgccgctgataatgacagcatggttcgtgtagacgtctttaaagtggagggtgatggttattatctggttccgatttatgttgctgatacgttgaaagaaacactgcccaataaagcaatagtggcccataagcaatatagtcagtggaaagaaatgaaggaagaagatttcttgttctcattatatccgaatgatttgattcgggttcagaacaaaaaggatatggtatttacaaaatctcaaaaagaaagcaatttgcccgaaaactatattgctaaagatattattgcctattacaaacaaacagatatttcggcaggagctattaagattataagcaacgatgatagttactctttacgtgggttaggtgtaaaaacacttcaacgtattgaaaagtatcaagtggacgttctcggaagctattataaagtgaaaacggaaaaacgccagctatttcattaa

SEQ ID NO: 77 - DNA, 3639 bp, Unknown
  Synthetic sequence or sequence of unknown origin
atgagtaaaatactggggttagatgttggaataggttcactgggttgggcaattattgatgaagatgccaggagaattgttgatctgggtgtgagaatatttgaaagtggcgaagagggggctactgatgcggcaggtagagcaagtcagataagaagatcatacagatcaacaaagcgactcaataagagacgtaagcatcgcaacattcgtttaaaatcatttattgaagaattaaacattatttctgttgaagatattaactgttcgtacaaaaccaaaggttttaatccggatacatggaggtacaggtcagaaggcatatctcgtaaactgagtccgattgagcttgcttcagttctcataaatctttctaattaccgtggatatagagatttttatgaagacgatgaggaagattcaggcaaacttgcagttgctaagaatcgcattaatacaatatatgaggagaagaaggatcaatatagaaccataggtcaaatgatctataacgaaccatgtttccgagatgaacgtaatgggaagttagttatacgtaatagagccatacgaggaacagatgggaagaaagaaactaattacgtgtacctgatcaatagaagtacgctcattgatgaactgaaagtattattatcatgccagcgagagtttggatacgaacaattaacggatgatgctatagacaagatctgttcgattatttttgttcaaagagattttgaagacggtcctggacccaacaaagcagaatctccagaaagacgcgaatcaatgatgaaatctctcaaagggcatcagtcatattcaggatttgatgaattggtcggtaactgttctttctatcccacggaaggcagggggcataagaactctcaattatatgatatgtatgttgttattaacacattatctcaattgaggttctattgcgataataaagaggtaaactgccctgaaagtgttgtcatggaaatacgtctccaattatttgagaatggtggttcactttccaaaaaacatctagagaaaatatgcaaagatcataaaattgaggtttcttttccgggtgagttgagtaagaaaaaagttataatcaaagcaccatatataaagatccttactgacgatcatttgtttgatgtagattttatgcagcaattcaaggaagagaattattacgatgattgttctctttcttcgaaaattggtctggctattgccaagtatgcaacgccacgaagaagaaaagatgaaatcaaaaataatgttacagatgaagaatacaataggctgggttatgcagacgggcttaaaacgataaagtctcttggagtgtcaaacgtgtcattcaaatatatgaaggaagctatttctgcttatcttaatggaattaaatatggagacttccaggcggactttatcaagaataatatagagaatgatgagaaaaagttcttgtctaatgatggtaagttactccctattaacgaccctgatatggttcgtaacccggtagtgtacaggacaatcaatgagactcgtaaaattgtaaatgccgtaatgggtttatataaagatatcaaaacaatcaatattgagattgcacgtgatattggaaagtcttttgaacaacgtaaagaaactgcaaaatatcagaaagaaaatgagaactcaaatgaagaattgagagcagaattacttagaaaactgtatagcgaagggtattcagtgatgctttcagatagattgttagataagtacaagctatggaaagaccagaagcacatgtgtatgtactctgggaaggagattcaatttaaggagattgttgcagctgtaaatgttcagatagaacacattgttccgcagtcgattattcttgatgagacattaaacaataaggttcttgttcttacggaagaaaaccagaaaaagaataaccgtcttcctctggaatacatggatagttcgcaggcaaagggttttaagaatcgtgttaataatctatataggacaaacaatatcaataggattaaatacgaatacttgatgttggaatcattaacggatgatgtgataagtggttttgttgaccgcaatattaacgatacaagaaccattagcaaatatgtttctaactacttgaggctttcatttaatggtgatgtaacagtaaacgttatcaaaggttcagtaactagtcgttttagaagaagatggcttggaacaagaagcaaaagatacgatggtgttccgtcagtttatggcttggagcaaaagacacgtaaacttcattattatcaccacgcaattgatgctgcagtcgttgcaaatcttaccagaccgtatattgagattgcacaagactatttgagaattgagagtatacgtaaggatgctgagtatcatgcaaaaaaaggaaattctaagacctcattagtattatatgatgagttggaaaaagaaaaggcaaagtctctcgataagatacatcatttctatggatttaatcgtgaatataccagatctttgcttgattcaggctttgttccgagtatttgtaaagatttcagaagtgagattgagattcgagttccacttgaaattacatttgacgcttttggttatacacaaatggaaaaatcatacaggtcgcttcgtaataatatggatgcaattaagagcaatttgaccgatgctgatatagaagcaggtactgttattgttccaaatatgctggaggatattaattctgaccttccaattgtctgccctgaagcagtatgtataaaaccaaatgctcagattgtattttctgacaaagactttgatccaaatgcagattctgatgtcattcgtaaacagttcgataaattcacaaagaatttgtcgccccgagatgtaatggattatattgaagatattaggatggttacggaagacgaatatgccacgagggttaagaaatactactcaagtgatcctacatttgcagaaagaattaaattgccatacgtttcatttaagatttccaaaaagttcaggggaaatatggttgcaagtgataatccgattgcattgaagaagactggctttaatacctatatagaattggagaatgacataaagaataatctaaaatcaccatattatgttcgattcaataaaggcatcaatgagagtggaaatttcactatttatgatgcaaggagctattactgtattgagatctttattgatgacaaaggaacatatcaaatacgtggtatacgatatgtagatgttgttcacgattccaagagaggaaagctacggctattaaaacctctgccgttagggtacaagcatgttatgtatttgtttaagaacgaatacataatttcatatgacaaaaagggtaacatcaagaacaacggctttggtgcatatagaggtgtagagaatattaatcgtaacacaggcaagataagactattttctaatatgaatctgagcggaagagataactctataaatttagcaggtgcttgttcaaaaatagaaatatctatcttgggtcatattatgggtatgaagaaatgtggagatcagtcattgtttataacggagaaaagctaa

SEQ ID NO: 78 - DNA, 3264 bp, Unknown
  Synthetic sequence or sequence of unknown origin
atgaaatatatcattggtttagatatgggaattgcctctgtgggttatgcaacattattattagatgataaggagcaaccttgtcgaatcctaaaaatgaattcgcgaatttttgaagcggcagaacaccccaaggatggttcttctttagcagcaccgcgcagaattaaccgtggaatgcgtcgcagattgcgccgccgccgttttcgcaaggagcaaatccgtgatctgatagcggaaaaaggcatcatgacaaccgaagaaatcgacgaaatctataacagcggaaaagagcttagtgatatctatgaaatcagagcggaagcgctggataggattctgagcaaggaagaatttgtgcgtctgatgattcacctttcccagcgccgcggattcaagtccaatcgtaaggtggatgcatcggacagtaagtctgagtcgggaaaactgctgatcgcggtaaaaaacaatcgcgagttgctgagcgaaaaagggtatcgcaccattggcgaaatgttgtataaggatgaacgctttgcggctaataaacgcaacaaagcggatgattattccaatacgttttcacgcgctgaatatgaagatgaaatcaatcaaatttttgaagcgcaactggcgctcggcaatccatacgccaccgatgatttcagaaagaaatatctggatatctatctgtcacaaagagcatttgacgatggtcccggcggcaaaagtccttatgccggcaatcaaatcgaaaagatgctgggtcactgtacctttgaagaaaacgagctgcgcgcagtaaaggcaagctatagctttgaatattttaacttgctttcaaaagtgaatgctatcaaaatagttggagaaggcggcaaaaggtcattgacagatgcggaacgcaaaagcgtgatcgcacttgcgtttgcgaaaaattctgtaacatacgcttcacttcgcagggagttgaagttaccggacggcaaatttttcaatatttcttacggaaagggcgacaagtctgccgaggaagtcgagaagaaaacgaaatttgcttatttgacggcatttcatacgtttaagaaggcgtatggtcaggcttatgtcggctggagcaccgaaaagaaaaacgcgcttgcatacgcgctgacagtctataaaaatgataataaaataattgcctatctgacagatcacaactttgaaaaagcggagatcgagatcgcgctgacactgccatcatttacgaaaacaggaaatttgtcggttaaggcgcttgataagctgattccgtatttagagcagggtatgctgtataacgaggcttgttcagctgcgggatataattttaaggcagatgatgcttccaaacgcatgtttttgcctgccaatgcaaaagacgctcccgagttggaggaacttcgcaatcctgtagtgcgtcgtgctgtatctcagacgatcaaggtgataaacgccgttattcgtgaatgcggtgaaagcccaacttttgtgaatattgaaattgcacgcgagttggcaaaggattttaaggatcgcaagcagatcgaaagagagcagaaggaaaatcaagagaaaaacgagaagctgatggagcgcttaaggaatgagtttcatatccttaaacccaccggtcaggacttgataaagctaaagctgtgggaggaacaggacggcagatgcccctattctcaaaagcccatttccatagagaagctgtttgacgtcggctatacggatattgatcacatcatcccgtattcaatctgctttgatgacacctataacaataaggtgttggtgctgtctgccgaaaaccgcatgaaagggaaccggcttcccatgcagtatcttggcggcaaaaggcaagatgatttcagactatgggtgaattctgctcatttaaggaaacggaaaaaagataacctgcttagggaaagctataccgaagaagacaaaagcggctggaaaaagcgcaatcttcaagatacgcagtatatggcatcatttatgctgaactatctgaaaaagtatctggcgctgcagccgtccgatcagggcagaaagaatcagatcatctctgtcaacggaagggcaacggactatttgcgcaagcgctggggcgttcaaaaaattcgtgagaacggcgacacgcatcatgcggttgacgcagtgataatcgcttgtgtgacgcagggaatgatcaaaaggatttccgaatacgctaagtataaagaaacggcgtttcaacatccggaaacaaaagagtactttgacgtggacaaaaaaacaggtgaagtcatcaatcgttttccgcttccgtatcccgatttcaggaaagaactggatattcgctgctctgatgatcccatacggctgctgcgcctgtatccgctggttcagtattcctccggagaagaggtcaagccgatgttcgtttcccgtatgccgaaccataaggtaaagggcgctgcccacatggaaacgatacgaggacatttcaaagaggacggaaaggactactccgtcgcgaaggtaccactgacttctttgaagctgaaaaacggcgagatcgaaggttacttcaatcctggcagtgacatgctgctctataacgccttaaaagcgcgattggcgcaatttggcggcgatggtaaaaaagccttttccgaacctttttataagcccaaggcggacggttcgcagggaccgcttgtcaaaaaggtcaaaatagtgaacaaatccactttgtctgtgccggtacacggtggaacagccgttgccgacaacggttccatggtgcgcgtggatgtgttttacgtagaaaacgagggttattatctggtgccggtttatgtgtcggatacggtcaagcgtgaactgccgaacagagcgatcgtggcgcacaaggcgtatgaggattggaaggagatggacgaaaacaactttgtcttttcgctgtatcccaacgatttgatcaagctgacatttgccaaggaaatgtctttctctcttacgaataaaggaagcagtcttcctcctgaaatgaagtgtaaagaaatattcgcgtattataaaggcacaaatattgcatcaggtaccatcggcgttattaaccacgacaacacctatggtatcggcagtttgggaataaaacgcttgccgcatatagaaaaatatcaggttgacgtattaggcaatattacaaaagtcggcaaagagaaacgcatgaggtttcgctga

SEQ ID NO: 79 - DNA, 3183 bp, Unknown
  Synthetic sequence or sequence of unknown origin
atgaagctgaacagatggcggctgggcctcgatctgggcacaaattctatcggttggagcgtgttcagcctggacaaggacaacagcgtgctggaactggtggacctgggcgtcagaatcttcagcgacggcagagatcccaagaccaaagaacctctggccgtggccagaagaaccgccagatctcagcggaagctgatctacagaagaaagctgcggcggaagcagaccttcagactgctgcaggctcagggcctgtttcctgccaccaaagaggaatgcctggaactgaagtctctgaacccctacgagctgcggatcaaggccctggatagcaagctggaaccttacgaactgggcagagccctgttcaacctgagcgtgcggagaggcttcaagagcaacagaaaggacggcagcagagaggaaaccgccgagaagaagcctagcgacgagatcaagacccaggccgatatgcagagccacctggaaaaggccatcaaagagaacaactgccggaccatcaccgagttcctctacaagaaccaggacgagaacggcggcctgagattcgcccctaacagaatgacctactatcccacacggaagatgtacgaggaagagttcgagctgatctgcaccgagcagaaaaagtactaccccgacgtggactgggacgtgatctacaagagcatcttctaccagcggcctctgaagccccaggccagaggctattgtgtgtacgagacagacaaagagcggaccttcaaggccatgccttgcagccagaagctgaggattctgcaggacatcggcaacctggcctactacgatagcgccaccaagacaaagatcgagctgaacgacaaccaggacagcatcctgtatgagctgctgaacagcaaggacaaagtgaccttcgaccagatgcggaaggccctgaagctgagcgacagcaacagcttcaacctggaagagaaccgggacttcctgatcggcaatcccaccgccgtgaagatgcggagcaagaacagattcggcaagctgtgggacgacatctccctggaagaacaggacctgatcatcgagacaatcatcaccgccgacgaggacgaagaggtgtacaaggtgctcgagaagtacgatctgacccaagagcagaaggacttcatcgtcaagaacaccatcctgcagagcggcaccaccatgctgtgtaaagaggtgtccgagaagctggtcaagcggatggaagagatcgccgacctgaagtaccacgacgccgtggatagcctgggctacaagttcgccgatcagaccgtcgagaaatacgacctgctgccttactacggcaaggtgctgacaggcagcaccatgggcgtgaactacagcgagcctgagagcaaccctgagaagagatacggcaagatcagcaaccctaccgtgcacgtggccctgaatcagaccagagtggtggtcaacgccctgatcaaagagtatggcaagcccacacagatcgccatcgagctgtccagggacctgaagaatagcgtggccgagaaggccgagatcgccagaaaacagaaccagcgggccaaagagaatatcatcatcaacaacgacatcagcgagctgtacaacaaggcctttcctggcaagacattctaccccaaccggaacgaccggctgaagtacagactgtggaaagagcttggcctgggcagcaagtgcatctactgtggcaagggcatcagcgcctccgagctgtttaccaaagagatcgagatcgagcacatcctgcctttcagcagaaccctgctggacgccgagtctaatctgacagtggcccacagcagctgcaacgcctttaaggccgaaagatccccttacgaggccttcggcagcaaccccaagggctacaattggaccgagatcgtgcagagagccaacggcctgaccaacaccagcaagaagaacaagttcagccccaccgccatggacagcttcgagaaggatagcagctttatcgcccggcagctgtccgacaatcagtacattgccagaagcgccctgagatacctgaagtgcctggtggaaaatcccagcgacgtgtgggctaccaacggcagcatgaccaagctgctgagagacaagtgggagatggactccatcctgtgccggaagttcaccgagaaagaagtgacacagctgggcctgaagccagagcagatcggcaactacaagaagaatagatacgaccaccggcaccatgccgtggatgccgttgtgatcggcctgacagatagaagcctggtgcagaagctggccacaaagaacagccacaagaacaaccggatcgaggtgcccgagtttcccatcctgaaaaccgacatgatcgagaaagtgaagaacatcgtggtgtccttcaagcccgatcacggcgccgagggaaagctgtctaaagagacactgctggggaagatcaagatccacggaaaagaaaccttcgtgtgccgcgagaacatcatcagcctgaccgagaaaaacctggatgacatcgtggacgagaagatcaaaaagctcgtgaaggatttcgtggccaagcacaagggcgagaagattgagaacatcctgacgcagttcagccaagagacaggcatcaagaaagtccgctgcgtgaacagagtgcagatccctatcgagatcaccagcggcatcgtgcctagatatctggcccctgaggattacttcgccgccatcatttgggagctgcccggcgagaaaaagacctacaaggcccagtacatccggcggaacgaggtggaaaaggactccaagggcatgaatatcgtgcggaagcaagtgattgagaagggcaagcctcatcctgccgccaagtacatctgcctgatccacaaggacgactacctcgagtttaccgacggcggcaagatgcacctgtgtagagtggccggctattccgccaccagaaacaatctggacatcagacccatctacagcgtgtcctactgcgccgactggatcttcagcaccaacgagaacatgctggaaaactactggaagccatctcctggccagaactgggtgtccgtgaacgtgctgtttagccagctgcaggcccacctcgtgacagtgaatcctatcggccgggtgttccggaagtga

SEQ ID NO: 80 - DNA, 3276 bp, Artificial Sequence
  Synthetic sequence or sequence of unknown origin
atgagctacgccatcggcctggattgtggaatcgcctctgtgggctatgccgtgatggatctggacgagaagggcaaccccaagcggatcatcagactgggcagcagaatcttccctagcgccgagcatcctaaggatggcagttctctggccctgcctagaagagaggccagaagcacaagaagaaggctgcggagacacaagcaccggctggaaagaatccggtacatgatcgtggacgagggcatcctgagccaagagcagctggatgtgctgtactccgagcctgtgtccgacatctacatgctgagagtggacgccctggacagacccctgaccaatgaggaatttgcccgggtgctgatccatctggcccagagaagaggcttcaagagcaaccggaaggtggacaaagaggacaaggacgacggaaagctgctgaccgccgtgtctggaaacaccctgctgatgaaggaaaagggctacagaaccgtgggcgagatgttcgccaaggatgagaagttcagcagccagaagcggaacaaggccgagaactacaccaacaccgtgtccagagagatggtcgaggacgaggtgcacaagctgtttgccgctcagagagagttcgactgccccttcgccaacgagacagtggaaaacagatacgtgaacatcctgttcagccagcggagctttgaggaaggccctggcggagattctccttacggcggcaatcagatcgagaagatgatcggccggtgcacattcttcccagaggaacagagagccgccaaggccacctacagcttccagtactttagtctgctgcaggccgtgaaccacatcagaatcgtgtccgacggcagcatcagaaccctgagaagcgacgagcggaagaacgtgctggaagccgcctttcagaccgacggcctgaccttcaagagaatcagagccgtgctgggcctgagcgagaacgacagattccggaacgtgtactaccgcagcgacgacaaagaagagtgggagagcaagaccaagttccagtacctgcacgcctaccacgagatgcggaagagattcgacaagctgaagaagggccacatctccatcgtgtccaggaccgatctggatgagatcggctacgccctgaccgtgttcaagaccgacgacaagatcatcagctacctgaaagagcacaccagcctggacaagagcgagatcgatgccgtgctgatgatgcccagcttcagcaagtttggccacatcagcgtgaaggcctgcaaggccatcattcctagcctggaacagggcatgacctacgacaaggcctgcgagaacgccggcatcaagtttcagggccacgatagcgacggcaagaccagatacctgcctgccaatcctaacgacgcccctgagctggaagatatcaacaaccctgtcgtgcggagagccgtgtctcagaccatcaaagtgatcaacgccatcatcagagagcagggcgagagcccagcctacctgaatctggaactggcccgggaaatgagcaagagcttccaggacagacaagagatcaagaagtcccacgaccagaacaacgcccggaacgagaagatcaagcaagagatcgccgacaacttcggcaaagtgaacccctctggccaggacatcctgaagctgaaactgtaccacgagcagcagggcgtgtccctgtactctcagaaagtgatcgcctacgacagactgttcgagcccggctacgtggacatcgaccacatcgtgccttacagcatctgcttcgacgacagcttcagaaacaaggtgctggtgttcagcaacgagaaccgcgagaagggaaacagagtgcccctggactatctgagaggcgaagaggccaacaacttcgtggtgtatgtgaaggccaacgtgaaggactataagaagaagcagcggctgctgcggagcagacccaccgaagaggacatcaaagagttcaaagagcggaacctgaacgacaccaagtacctgagccggttcctgctgaattacatccaggatcatctgcagttcagcgagagcggcagcgataagaccaagcgcgtgacatctgtgaatggcagcgtgaccgcctacatgagaaagagatggggcatcaacaagatcagagagaacggcgatctgcaccatgccgtggatgccgctgtgattgcctgtgtgaccgatggcatgatcaaccggatcagccggtggtccaagtaccacgaaaccgagtacgaagagttcgagggcgagtcctacgctgtggaccctagaacaggcgaggtgctggatcggttccctctgccttatcctgagttccggaaagagctggactgccggctgttcgacaacgagaagcacatgcacgaggccctgaccagactgagcaactacagagatgtggaactgagcaccatccatccttgcttcgtgtcccggatgcctaaccacaaagtgacaggccctgctcaccaggatacagtgcggagccctagacactacgaagaggatggcatcgtgatcgccaagacagccctgcagaacctgaaactgaaggacggggagatcgagggctactacaagcccgagagcgacaggctgctgtacgatgccctgaaagccagactggtggaatttggcggcgacgccaagaaggcctttaaggacgacttctacaagcctaagtccgatggcaccagaggacccctcgtgcggaaagtgaaaaccttcaaaaagtccagcctgaacgtgtccgtgaacaacggcaaaggcgtggccgataatggcagcatggtccgaatcgacgtgttcttcgtggaaggcgacggctactacttcatccccatctacgtggccgacacactgaaagaggaactgaccaacaaagccgtggtggcccacaagagctacgacgagtggcgcgaaatgaaggaagaggacttccagttcagtctgtaccccaacgacctgatcctcgtgaagaaggccagcggcgccattcctctgaccatcaacctgaaggatagcaccctgcctccaaagattgagaagtccgaggtgttcctgtactatcggaagtccggaatcgctggcgccaccatcgtgtgcgataatcacgatggcagctactacgtgaccaacctgggaatcaagaccctggccagcatcgagaagtaccaggtggacgtgctgggaaactactacaaagtgggcaaagagaggcggcagagcttccggtaa

SEQ ID NO: 81 - DNA, 3267 bp, Artificial Sequence
  Synthetic sequence or sequence of unknown origin
atgatcccttacgccatcggcctggatgtgggcatctcttctgttggatgggccgctgtggccctggatgaagctgaaagaccttgcgccatcctggacatgggcagcagaatttttgatgccgccgagcagcctaagacaggcgcttctcttgccgctcctagaagagaggccagaagcgctagaagaaggctgcggagacaccggcaccggaatgagagaatcagacggctgatcgtgaatgccggcctgctgaccgaggaagaactgaccacactgttcgacggcaccctggaagatgtgtacagcctgagagttagagccctggacgagcccgtgtccaagcctgattttgccagaatcctgctgcatctggcccagcggagaggcttcagaagcaatagaaagagcgccagcgacaaagaggacggaagaatcctggccgccgtggccgagaataccatgagaatggccgaaaagggctacagaacagccggcgagatgctgctgtgtgatcctgcctttgctcagcagaagcggaacaaaggcggcgactacaccaccaccatcagcagagatatggtggccgaggaagtgaaaaccctgttcgccagccagagaaatgccggcagtgcttttgctgcccctgagctggaagaggcctacctggaaatcctgctctcccagagaagcttcgatgaaggccctggcggcgattctccttatggcggatctcagatcgagcggatggtcggaaagtgcacattcttcccagaggaacctagagccgccagagcctgctacagcttcgagagattcagcctgctgcagaaagtgaaccacatccggctgcagaaggacggcgagagcatctgtctgacagagggccagagaagaaagctgatcgagctggcccacaagtccgccagcctggacttcgccagaatcagaaagacactggaactgcccgccgagtaccggttcaacgtggtgtcctacagaaccgagaacacccctgaggaagccgagaaaaaagagaagttcaactacctgaagggctaccacagcatgcggagcgccatcgagaaagtcggcaagggaagatttgccctgctgacagccgagcagagagatgccatcggcaccatcctgacactgtacaaggctgacgagagagtgcggagcgaactgatggccgctggaattgaggcctgtgatgccgaggctctgctgtctatcggcggctttagcaagacaggccacatcagcctgaaggcctgcagactgctgatcccattcctggaacagggcatgaactacaacgaagcctgtgccgccgcaggcctggattttcacgctcacgaggatgacggcagaagcgagtatctgcaccccgccgaagatgacttcgccgacattacaagccctgtcgtgcggagagccattagccagaccgtgaaggtgctgaacgccatcatcagaagatacggcccctctcctgtgttcgtgaacattgagctggctagagagatggccaaggacttcagcgagcggaagaagctcgagaaagagaacaaagaaaaccgggccaagaacgagcgcatcctggaaagaatccggaccgagtacggcaagaacaacgccacaggactggacctggtcaagctgaagctgtacgaggaacaaggcggagtgtgcgcctacagccagaaacagatgagcctgcagagactgttcgagcccaattacgccgaggtggaccacatcatcccttacagcctgtccttcgacgacagctaccggaacaaggtgctggtgctgactgaagagaaccgcaacaagggcaacagactgcccctgcagtacctgtccggaaagcggagagaagatttcgtcgtgtgggtcaacagcagcgtgcgggactacagaaagagacagaagctgctgaaagagcggctgaccgaagaggatgagaagcagttcagagagagaaacctgcaggacaccaagaccatgagccggtttctgctgaactacatccaggacaacctgctgttcgcccctagcgcctgtggcagaaaaaaacgcgtgacagccgtgaatggcgccgtgaccagcttcatgaggaagagatggggcatcaccaaagtccgcgaggatggcgatctgcatcatgccgtggatgccctcgtgatcgcctgtaccacagacgccatgatccagcaagtgtccagatacgccgccttccgcgagtgcagatatatgcagacagagacaggcagcctggccgtggacgaacaaacaggcgaggtgctgagagagttcccctatccttggcctcagtttcggagagagctgggcctgagactgagcaatgaccctgttagactgctgcgggacatgagaatcccattctacgacgagcacgacatcgtgcccaagcctctgttcgtgtccagaatgcccagacggaaagtgacaggcgccgctcacaaggataccgtgaagtccccaagagcactggatgagggctctgtggtggtcaaaagacccctgaccgacctgaaactgaaggatggggagatcgagaactactacaggcccgagagcgacaggctgctgtatgccgctcttaaagccagactggccgcttttggcggagatggcgctaaagccttcgccgagcctttctacaagcccagacacgatggaacacagggccctccagtgaaaaaagtgaagctgtgcgaacccagcacactgaacgtggccgttcatggtggaaaaggcgtggccgacaatgacagcatggtccgaatcgatgtgtttcacgtggaaggcgacggctactacttcgtgcccatctacgtggccgatacactgaagcccgaactgcctgataaggcctgcgtggccttcaagccctacgaggaatggaagcctatgcgcgtggaagatttcctgttcagcgtgtaccccaacgacctgctgagagtgacccacaagcggacaatgaagctgtccaagaccaacaaagagtccagcctgcaggatagcgtcgagggcaagagcatgttcctgtactacatcagcgccggcatcagctccgccaccatctcttgcagaaaccacgacaacacctacgagatcagaagcctgggcatcaagaccctcgagaagctggaaaagtacaccgtggacgtgctgggcgagtaccacaaggtggaaaaagagcctagaatccccttcacacagaagcggtcctga

SEQ ID NO: 82 - DNA, 3153 bp, Artificial Sequence
  Synthetic sequence or sequence of unknown origin
atgaagagaaagtgcggcatcggcctggacatcggcatcggatctatcggctacgtggtcatcagccggaccaacaacttcgacgccagaatcgaggatctcggcgtgcgagtgttcgacagcggcgagaatatccggaagaaggcctctaacgcccaagagcggagaggctatagaagcgtgcgtcggctgctgagaagaagaaagcaccggaaagagcgggtcaagaagttcttcctgaagatcaagctgatgaacgagatccagctgaaggcctgggaagagagaaacggcgaccagaacgtgctgcagaccagaatcaagggcctgagcgagaagctgaagcccgaggaaatcctggactgcatcatccacatctgcaaccaccggggctacagagagttctacgacgaggacagctgcaacgagaacatcaacaaggacgacctgaagaagatcgaaggcggcctggccagcttcgatgagctgtaccagcacggcaattacaagagcgtggccgagatgatcctgaaggaccccgtgttcaagaccgagacaaccttcgtggactaccggaaccacaagaacaacaaccgctacgtgctgatcaagcgcgagttcgtgaagaaagagctggaaaacatcctgcaccagcagagcaagtactaccctcagctgaccgagaacaacatcaagatcatctgcgacaacatggtgttcatccagcgggactttgagacaggccccggaaacgagaacgacaagaccagacggttcatgggcttcatcgacagcatcggcaagtgcatgtactacaaggatgagaagcgggcctaccggtccaccgtgattgccgatatctacgccctggtcaactgcctgagccagttcagcttcatcaacaccgaaaccggcgagatcctgctgcctgataatgccgccacaaagatcatcgacacagccctgctgaacgccgccatcaccgagaatgatatcaagaacatcctgaagccgtaccacctggaaatgagaaagcctgagaagctgcaagtgaaggtgcccgataccgtgcggacactgaagatcctgaaaagcgtgctgaccaacgccggctataagtacgaggaactgatcaaagagaagcagttcgacgtcaacaaccccagcaagctgcatcagctgtgtctgctgctgagcgaaaacatcacccctgccagacggacccgggtgctgaaagctaaaggctggaacgagaaactgcagaaagaagtgattcggaagaagttcggcggcaccgccagcgtgtgcgagaagtatatgatcgacgccatcgaggccttcaagcggggcgagacatatggcaatttccaggccagaatgctgaaagagagagaggaaaccctgtccgagagcaagaagcagaagtttctgagccccttcgacaagaaaatcgacgaagaactgattaagaacaccgtggtgttcaagtccgtgaacgagactcggaagattctgaacgagctgatcagaagatacggcagccccgagtacatcaatatcgaggtggccgacgacctgggcagaagcttcaaagagcggtctaagatcatcaagcggaacaacgacaagcagaaggaccgggaaaagatcaaaaacaaactgatcgaactcggcctgcggaaagagggcgaagtcaagcctttcgacatcgagcggtacagactgtgggaagaacaagagggcagagatctgtataccggcgaggccattcctctggaaaagattctgtccggcatctacgatgtggaccacattgtgcccttcagcctgatcctggacgacagcctgcagaacaaggccctggttaatctgggcgtgaaccggcagcagaaaggccagcaagttcccctggctttcctgaacgtggtggacaagatcgactacctgaagagagtgaacgtcctgtacaaaaacaagaagatcagcaccaaaaagtacaagtacctgatgctgcccaacctgtacgccaacagcgagctgctgacagagtggaagtccagaaacatcaacgacacccggtacatcacccggttcctcgtgaactacctgagcgccaacctgctgttcgactccaccaagaccaagaacgtgttcggcgtgaagggcatcatcaccagcaagatgcggaagctgtggctgaacaagaaaacctggggcgacgagcagaagaacagagacaacaatctgcaccacgccgccgatgctctcgtgatcgctaatctgacacccgcctatctggaaatcgccagcgacaagattaagctggaccggatctacaaggactaccacaaaaagatctccaacgagtacctgacctacctgtccaagtctgtgaacaagatggtcaagtactatggcttcaacaaagagtacgccgagaagctcctgggcacccctaatagcagaatccccgccatgatccggaatatcgccgacgaggccgatatcaggctgtgggacaacagcatcgagtactataaggacgtgtccgaggaacagttctacaagaacgtcaaggccttctacaacgacgacaccgccttcgccaaatccgtgaagcctgtgctggtgtcctataagcagaaccggaagtaccagggcaagttcaccaaggacaaccctctgaagaaaaacgagatcaagggcgccttcatcgagaagattgacagcctgggcaacgtgaacattctggacgccaaagagtattactgcgccgagctgtacaagaacctgcagggccagaccatcctgcggggcatcagatatgtggacctgcagaaaaagaacaaaaagctgtacatcatcagcagctaccccgaggactacaagaaacacatcatgtacctcttcgccaacgactacatcaaggtgttcgataacgacggcaagatcaagttcaacggctactacaagagcatcaagaatgtgaaccggaacgccatctactacaaaaacaacaacagcaacatcctggaagagaaaaccatcagcaagaaggacgtcgtcaagaaatactccgtggacatcctgggaaagatcggcggagagatcaagtgcagcgtgcccttcctgagcctggaagaaaacatctga

SEQ ID NO: 83 - DNA, 3249 bp, Artificial Sequence
  Synthetic sequence or sequence of unknown origin
atgagctacggcatcggcctggatatcggaatcgcctctgttggctgggccatcgtggacctggaccagaatgagaaccccatgggcatcatcgacctgggcgccagaattttcgatgccgccgagaatcctaaggacggcgcttctcttgccctgcctagaagagaagccagaagcgccagaagaaggctgcggagacaccggcaccggatggaaagaatcaagagactgctggtgtccagcggcatcatctccgatgtggatctggaacacctgttcgacggccagctgcaggacatctacgagctgagagccaaggctctggactacagcgtgaccaacaaagagatggccagaatcctgctgcatctggcccagagaagaggcttcaagagcaacagaaaggccgagaacagcagcaaagagaacggcgagctgctgaccgccgtgtctgccaataccgagagaatgagagagaagcactaccggaccatcggcgagatgttctacaaggacgaggtgttcgccacctacaagcggaacaagggcgagaactacctgagcaccgtgcagagagatatggtcgaggccgaggtgcacaagatcttcgatgtgcagagaaccctgggcaacaaccagttcaccaaagagttcgaggacgcctacaagggcatcctgctgagccagagagcctttgacgaaggccctggcggcaattctccttacggcggcaaccagatcgagaacatgatcggcatctgcaccttcgagaacgtgcgccagggcaaagaaaagaatgagcagagggccgccaagagcaccttcacctttgagtacttcaacctgctgcagaaagtgaaccacctgagactggtggtggacggcaagaacatccctctggatgacgagcagagaggcatcatcatcaagctggccaagaccaaggccgacctgaagtatagcgccgtgcggaaagccctgggaatcgccgataatatcctgtttgccggcctgaactacgccgacaacgacgtggtggaatacgagaagaaacagaaattcgacgtgatgaagtactaccaccagatgcggaaggcactggacaaggtggaaaagggcagaatcgccaagtacaaccccgagcagctggacgccattgccaccatcctgaccaagttcaagggcgacgatcggagaagagagtgctttgccgccatcggcatcgacaccaaagatgtggaccagctgctggatatcaccggcgtgtccaagtttggccacctgagcatcaaggccctgagcaagatcatcccctacatggaaaaaggcgccctgtacaacgaggcctgtgaagccgccggatacgatttcagagcacacgctggcggcaccaaggataagctgctgcctgcctatatggaagagatggacgacatcacaagccccgtggccagaagggccatcagccagaccatcaaagtgatcaacgccatcatccggaagcagggcgagagccccatctacatcaatgtggaactggccagagagatgagcaagaacttcaaagagcggggcgagatcaccaagaagaacgaggaaaacagagccgccaacgagcggctgatggaagaaatcaaaacaaacttcggcgtggacaaccccaccggcctggacctggtcaagtacaagctgtacaaagagcaggacggcatcaccccttatagccagcaagccctggatctgagcagactgtttgagcctggctacgtggacgtcgaccacatcgtgccttacagcatcagcttcgacgacggctacgtgaacaaggtgctggtgctgagcagcgagaacagagagaagggcaacagactgcccctggtgtacctgcaagagaaatttggacagcaggccgccgacaatttcgaagtgtgggtcaccaacaacgtcaagaactaccggaagcggcagaagctgctgaagaaggccatcaccgaagaggacatcaacaagttcaaagagaggaacctgaccgacaccaagacaatcgcccggttcatgctgaactacatccgggactacctggaatttgcccctagcctgaccgataagaagaaacgggtcacagccgtgaatggcgccgtgaccgcttacatgcggaaaagatggggcattgccaaagtccgcgccgacggcgatagacatcatgccgtggatgccctcgtgatcgcctgtaccaccgacaagatgatcatggaagccagctggtacagcaacatccaagagacagagacaaacagagagctgctccagcagaagttccctctgccatacagcgacttcagccgggaactgtctgccagactggctcctaatcctgtggctgccctgacacagcagaacctgctgtactatatcgacaaggacctgaacgactacaagcccatcttcatctccagaatgccccggcacaaagtgacaggcgccgctcaccttgagacaatcagaggcgtgaagatgctggacgagggctgtaccgtggccaaagtggaactgacagccctgaagctgaacaaggatggcgagatcgatggctactacaaccccagctccgacctgatcctgtacaatgccctgaaagcccggctgcagcagttcgacaatgacgccaagaaggcctttgccgagcctttctacaagcctaagtctgacggcacacccggccacctcgtgaaaaaagtgaaggtgttcaagaaaagcaccctgaacgtggccgtgcacaaaggcaacggcgtggcagataatggcgacgtgatccggctggacgtgtaccacattgccgatgacggctactacttcgtgcccatctacgtggccaacaccatcaaggatctgcccaacagagctgtggtcaacggcaagagctacaagcagtggaaactgatgaagcccgaggacttcatcttcagtctgtaccccaacgatctgatccacgtggtgtcccggaacgagatcagcatgtctagagtgtgcgccgagagcacactgcctgagaagaaagaatgcaaagaggaatggctgtacgtccagcagggctttgccggaaccacagtgaccgtgatcaacaacgacaacacctacatcgtgaagtccctgggcctgagaaaactgcagctcctggaaaagtaccaggtggacgtgctgggcaactacgtgaaagtggaaaaagagacacgccagaagttcaagtag

SEQ ID NO: 84 - DNA, 3246 bp, Artificial Sequence
  Synthetic sequence or sequence of unknown origin
atgagctacggcatcggcctggatatcggaatcgcctctgttggctgggccatcgtggacctggaccagaatgagaaccccatgggcatcatcgacctgggcgccagaattttcgatgccgccgagaatcctaaggacggcgcttctcttgccctgcctagaagagaagccagaagcgccagaagaaggctgcggagacaccggcaccggatggaaagaatcaagagactgctggtgtccagcggcatcatctccgatgtggatctggaacacctgttcgacggccagctgcaggacatctacgagctgagagccaaggctctggactacagcgtgaccaacaaagagatggccagaatcctgctgcatctggcccagagaagaggcttcaagagcaacagaaaggccgagaacagcagcaaagagaacggcgagctgctgaccgccgtgtctgccaataccgagagaatgagagagaagcactaccggaccatcggcgagatgttctacaaggacgaggtgttcgccacctacaagcggaacaagggcgagaactacctgagcaccgtgcagagagatatggtcgaggccgaggtgcacaagatcttcgatgtgcagagaaccctgggcaacaaccagttcaccaaagagttcgaggacgcctacaagggcatcctgctgagccagagagcctttgacgaaggccctggcggcaattctccttacggcggcaaccagatcgagaacatgatcggcatctgcaccttcgagaacgtgcgccagggcaaagaaaagaatgagcagagggccgccaagagcaccttcacctttgagtacttcaacctgctgcagaaagtgaaccacctgagactggtggtggacggcaagaacatccctctggatgacgagcagagaggcatcatcatcaagctggccaagaccaaggccgacctgaagtatagcgccgtgcggaaagccctgggaatcgccgataatatcctgtttgccggcctgaactacgccgacaacgacgtggtggaatacgagaagaaacagaaattcgacgtgatgaagtactaccaccagatgcggaaggcactggacaaggtggaaaagggcagaatcgccaagtacaaccccgagcagctggacgccattgccaccatcctgaccaagttcaagggcgacgatcggagaagagagtgctttgccgccatcggcatcgacaccaaagatgtggaccagctgctggatatcaccggcgtgtccaagtttggccacctgagcatcaaggccctgagcaagatcatcccctacatggaaaaaggcgccctgtacaacgaggcctgtgaagccgccggatacgatttcagagcacacgctggcggcaccaaggataagctgctgcctgcctatatggaagagatggacgacatcacaagccccgtggccagaagggccatcagccagaccatcaaagtgatcaacgccatcatccggaagcagggcgagagccccatctacatcaatgtggaactggccagagagatgagcaagaacttcaaagagcggggcgagatcaccaagaagaacgaggaaaacagagccgccaacgagcggctgatggaagaaatcaaaacaaacttcggcgtggacaaccccaccggcctggacctggtcaagtacaagctgtacaaagagcaggacggcatcaccccttatagccagcaagccctggatctgagcagactgtttgagcctggctacgtggacgtcgaccacatcgtgccttacagcatcagcttcgacgacggctacgtgaacaaggtgctggtgctgagcagcgagaacagagagaagggcaacagactgcccctggtgtacctgcaagagaaatttggacagcaggccgccgacaatttcgaagtgtgggtcaccaacaacgtcaagaactaccggaagcggcagaagctgctgaagaaggccatcaccgaagaggacatcaacaagttcaaagagaggaacctgaccgacaccaagacaatcgcccggttcatgctgaactacatccgggactacctggaatttgcccctagcctgaccgataagaagaaacgggtcacagccgtgaatggcgccgtgaccgcttacatgcggaaaagatggggcattgccaaagtccgcgccgacggcgatagacatcatgccgtggatgccctcgtgatcgcctgtaccaccgacaagatgatcatggaagccagctggtacagcaacatccaagagacagagacaaacagagagctgctccagcagaagttccctctgccatacagcgacttcagccgggaactgtctgccagactggctcctaatcctgtggctgccctgacacagcagaacctgctgtactatatcgacaaggacctgaacgactacaagcccatcttcatctccagaatgccccggcacaaagtgacaggcgccgctcaccttgagacaatcagaggcgtgaagatgctggacgagggctgtaccgtggccaaagtggaactgacagccctgaagctgaacaaggatggcgagatcgatggctactacaaccccagctccgacctgatcctgtacaatgccctgaaagcccggctgcagcagttcgacaatgacgccaagaaggcctttgccgagcctttctacaagcctaagtctgacggcacacccggccacctcgtgaaaaaagtgaaggtgttcaagaaaagcaccctgaacgtggccgtgcacaaaggcaacggcgtggcagataatggcgacgtgatccggctggacgtgtaccacattgccgatgacggctactacttcgtgcccatctacgtggccaacaccatcaaggatctgcccaacagagctgtggtcaacggcaagagctacaagcagtggaaactgatgaagcccgaggacttcatcttcagtctgtaccccaacgatctgatccacgtggtgtcccggaacgagatcagcatgtctagagtgtgcgccgagagcacactgcctgagaagaaagaatgcaaagaggaatggctgtacgtccagcagggctttgccggaaccacagtgaccgtgatcaacaacgacaacacctacatcgtgaagtccctgggcctgagaaaactgcagctcctggaaaagtaccaggtggacgtgctgggcaactacgtgaaagtggaaaaagagacacgccagaagttcaag

SEQ ID NO: 85 - DNA, 3198 bp, Artificial Sequence
  Synthetic sequence or sequence of unknown origin
atgagactggtgctgggcctcgatatcggaatcgcctctgtcggctacggcatcatcgacatcgagacaggcgatatcatcaccagcggcgtgcggctgtttaccgaggccgacaagaaaaacaacgaaggcaggcggagcttcagaagcggaagaaggctgctgagaaggcggaagctgcggaaagaggaactgaaagagctgctgaaggacaacggcgtgtacgagtgggatagctctctggacccctacatctgcagagtgaagggcctgaacgagaagctgagcaatgccgagctgaccacctctctgctgcacatctgtaaacaccggggcagcagcctggaaaccgtggaagatgagaacaacaaagaggacggcctgaagaacgtgctgaccgagaacgacaacctgatcaagcagggcaaatacgtgtgcgagatccagctcgagcgcaaagagaagaagggcaagatccggggcatcaacaacaacttccggaccaaggactacgacagcgaactgctgaagatcctgagcaaccagggcctcgacgagaacatcaacaagaagatcgaggacatcatcacccggcggagacacttttctgttggccctggcagcttcatcagccagacaatctacggccaggtgtacaacgaggatggcaccgtgcgcgagaacatgatcgagaagatgaccggcaagtgcagcgtgtaccccgatcagctgagaagccctaaaagcgcccctagcgccatcttcttcaacctgctgaacgacctgaacaatctgagagtggccgacgagcccatcgacgtggacaagaagcaagagctgatcaaagaggccttcgagaagaagtctctgacccctctgaaggtggccaaggtgctgggagtgaacctggacgacattgagggcttccgcaagaatgagaagtccctgcctatcctgaccgacctggccgacttcaagatcatggtcaacatctttgagaagaacggctacatcatcaaggtcgaggacctggaactgctggacgagatcgccgtgatcatcacaaagaccaaagtgaagaaagagcggatcgacgagatcaagatcaagggcgtcgtgaacgaaaagatcctggacgagctgagcgacatcaccagattcacaggctaccacagcctgagcctgaaggccatccgggaactgaacaaagagctgtacgagacaacctacaaccagatggaaatcctgagcctcagcaaccacttcgagttcatccacagcaacttcagccagaaaggcaagaagaagattgccatcaaccaggacgccattctgagccccgtggccatgagaagctactgccaggccatcaaggtggtcaacgccgccagaaagaagtacggcgagtttgaggccatcgtggtggaaaccaccagagacaagaacagctacgaggaaaagaagcggatcaaagaagagaacgacttcttcgctgagctgaacaagaacgccgaggaactggtcaagggctacaacgtgaagctggacggcaagctgaggaccaagctgagactgtacctggaacaggactgcaagaccggctacctgcaagagcctatcgacctgcctctgctgatcaaggaccctaccgcctacgagatcgaccacatcatccccatcagcatcagcctggacgatagctacaacaacaagaccctggtcacccgctacgagaaccagaaaaagggcaacaacacccctatcaaggcctacgagtccgacaatttcctgaacaaggacgtgaacgagtacaagaagtttatcgccagcatccggaacaagcagagcggcatcagctggaaaaagtacaacaactacatgtacagcaaggacatcacgaagtacgaagtgatgaaggagttcattgcccggaacctggtggacaccagctacgccaacagactggtgttcaacaccctgaccagatacttcaaggacaatgggatcaacaccaaggtgcacaccatcagaggcagcgtgaccagcgccttcagaaagctggtcaaaggcctggaaaaggaccgcgacaaggattacagccaccacgccatcgatgccctgatcgtggccagcgtgaagaaaatgaacctgttcgacaagctgctcaccgacttctctatcgccgacgacggcaagaacgtgatcattaacaaggacaccggcgagatcagcaagatcgacgacgacctgtactttaaggacgccccattcctgaagttcctcaagagcctgctgcggtacaaagtgaccgactacagctaccagatcgacaccaagcctaaccggtccattgccgaccagaccatctactccaccagaaacgtggacggaaaggactacaccgtgaaaaagatcaagaatatctacgaccccaaggccaccacactggccgatgacattgtgaacggcgtgacaggcaagtacctgatggaaaagaacgacagccagacctaccagaaaatcgtggacatcgtgaactactacgccaaagagtacaggggcagcgataagctgaaggatgacaagggcaaaaagaagttcgtcacgaaccctctcaaagagcatctggacgaaaccggcgagtacatcaccaagtatagcgtgaacaacaagggccccgtgatcaccagcatgagatactttgatggcgagctgggcagccacatcgatatctcccagaactacaagaacatcggcgacaaaaaggtggtgctgctgcagatcagcccctaccggaccgatttctacaaggacgagggcatctacaagttcgtgaccgtgcggtacagcaacatcaagtactacaaaaaggacgactccttcgtgatcaacgagcagtggtatctgcaagagaagcgcaagaaagccatcagcgagaatgccgagttctgcttcagcatgcaccacaatgagtacatcgagattaagagcagcgacgagtgcaacctgtaccggttcaccgccaccaacaacgacaaggccaacaccatcgaagtgaaagagatcgacagatacgagaagaaacagaacattaagaccatcgggaagaagatagtcgagctgaagaagtacagctgcgacagcctgggccagctgagagaagtgaaaaacgccagactgaagctgaggctgaagtga

SEQ ID NO: 86 - DNA, 3147 bp, Artificial Sequence
  Synthetic sequence or sequence of unknown origin
atggaacagaagctgaactacgtcatcggcctggacatcggcatcggatctgttggatgggccgccatcaacctggacaagcggagaattgaagagtccggcgtgcggctgtttgatagcggagaagtgctggaccagaacaagcggaagagaaccagccagcagcggagaggctacagatccacaagacggctcgttcggagaagggcccacagaaccgaaagaatgaagcagtggctggaaaagatcggactggtgtctgccgagacactggccgagtattatgaggcccctaccgctcatcccctggaactgagagttagaggcctgacagaaaagctggcccctgctgaacttgccgccgctctgctgcacattggcaagcacagaggcttcaacgagttctaccagctggacgaggaagagaagaagtccctgtccaaagaggaaaaagaggatcggtccagagccgaggcctacgagagactgattcaagtgatgcctggcatggccccagctcagctgtatctgtctcaccccatgttcatgagcgagtttggcgtgcggtacagaaacaccaagaagcaggacgagagcaagaaagtgctggtgccccggaccgagatcgagaaagagacacacagaatctgcgagaagcaggcctctttctacccctgcctgaccgagcagaacagagagaagatctacgagatcctgttccggcagcgggactttgaggatggccctggcgatcccaacgacgagacaagacagtacaagggcttcctggacaccatcggcaactgcagattctaccccgagctgaagagaggcgccagacagtctgtgctgggcgatctgttcgtgctgatcaaccggctgagccagaaccggtactttagcgccgaaacaggcgaggtggtggatagcgccgatgcctacagggaaatcatcgagacagctctgctgaacggcagcctggaaatgaaggaagtgggcaagatcctgaagaactacgggatcgagatgctgaacgccaacgaggaaaaggccgactctcccaatcggtgcctggccttcatcagaatgatcaagcccatcctggaaaacaacggctacgactgggacgccgtgatcagagctgagtaccccttcacaccctacaacgaggacagcttcctgaacagagtgggaaagattctgagcgagaacagaacccctcagagaagagtggacctgctgaagaaagctggcgtgtccgagggaattgccgacgcactggccaagagaaagacaggcggaaccgtgtccgtgtccgaccggtatatgctggaaagcgtggaagccttcatgaacggcgagctgttcggcaactacaacgccagaagagaaaaggatctgctggcccaagtgcggaccggcaagaagtataagaagctgcctcctatcgagaagggcgactacgtggacaaccccgtggtgttcagatccatcaacgagacacggaaggtgctgaatgccatcattgagaagtacggcagccccaacgccatcaatatcgagatcgccgccgacctgagccggacctttctggaaagggacctgatgcggctcgagaacaacagaaaccggatcgaaaccgagcgcatccagaagaagattgccgagctgctgcataccaaggacgagatcatgcccgtgcaggtcgagagatatagactgggcgagcagcaaggctggaagtgcccttattgtggcgcccctatcaccatggaaaccgccatccagaaagacgagcggagctatgagatcgaccacatcgtgccctacagcctgatcctggacaacacccagcacaacaaggtgctggtccaccacggctgtaatcaggccaagggacagagaaccccactgatgtacctgagcgctgacgccgccaagaaaaaagagttcatcaaatgggtcaacgccgcctacgccaaaaagcagatcagcaagcgcaagagagagtacctgctgcagcccgacctgaacgacgagcagatgcaagagtggaaaacccggaacctgaatgacacccggtatatcgccaagtacctcgtgcggtatctgaacgacaacctgctgttcgacagcgaagaaaagaacaacgtgtacgccgtgaagggcgccatcacaagccagctgagaagagtctggctgaacaaggacacctggggaggcgacgataagagcgagctgagaaaagagagcaacctgcaccacgccgtggatgccgtggttatcgctaattgcatgcccggctacatcgagctggccgaagaagccctgagactgcggagaatgtaccacgaggaaggcaagcgggaaaccgagaattggaccgccgtgctgaacaatgccgtggaccggctgtaccgctactacagaatgcctaaggcctacgccgaacagatgctgcggaacatcaagagaatccccagcttcatccccgacctgtctgaggaagtggacgccagattttgcgactgcggcctggaaaatgagaagcagtacagaagcaagctgcgggccttctacgccgatgatctggcctttgccgccggaatcagaatgcccctggtgtcctacaagcccaacagaaaggccacaggcaagatcaccgccgataaggccgtgaagaagggcacatctcagagcctgctggtcaagaaaatcgccgaggacaataccaccacactggacgatgccagctactactgcaccgaggtgtacagaaagaaggacggcacactgggcctgagaggcatcagatactccatgctgaaacgcgacaacgggaagatcatcctgaatgagcagcctccagagaactacgccgtgcacatcatgtacctgttcaagaacgactacctccggatctacgacaagaacaacaagatcaagttcgagggctactacctcagcgtgtacgacatgaaggcccagagaatctacaccgccgaccggatcaagggcagaaacgagaagtctgtgggcatcctgaaaaatgaccgggtcgagaagctggatgtgtccatcctgggagatctcggcggaatccagagctgtggcaagcctttcctgagcgaagtgacccggtcttga

SEQ ID NO: 87 - DNA, 4458 bp, Artificial Sequence
  Synthetic sequence or sequence of unknown origin
atgaagaacatcctgggcctcgacctgggcaccaattctatcggatgggccgtcgtgtctaagagcgacgatggcaagtacacccaggacatcaagctgggcagcagaatcatccccatgagccaggatgtgctgggcaagtttgatagcggcgtgaccgaatctcagaccgccgtgcggacaagctacagaggcatgagaaggctgagagagcggtgcctgctgcggagagaaagactgcatagagtgctgcacgtgatgaactttctgcccgagcactacgacaacgccctcggctggaacaagaaccagaacagcacctacggcaagtttctgaaccacggcgagcccaagctggcctggcgaaaagatgagacaggcaagatgcagttcctgttcatggacagcttcaacgagatgctggccgacttcgccaaacaccaacctggactgctggccggggataagaagatccctctggactggaccctgtactacctgcggaaaaaggccctgacacagcccatctctaagcaagaactggcctggatcatcctgaacttcaaccagaagcggggctactaccagctgagaggcgaggaagaggaacaagagaagaagaacaagctggaagagtactacaagctgaaggtggtcaaggtggaagccaccgatgagcagaggggcgacagcagatggtacaacatccacctggaaaacggctggatctacagacgggccagcaagatgttcctggacgagtgggttggaaaagagagagagttcatcgtcaccaccgacatcgacgagaacggcaaccctaagctggacaaagagggcaacgtcaagcggagctttagagcccctggtgccgatgattgggccctgcagaagaagaggaccgagaacagcatcgacagcagccacgtgacagtgggcgagtacatctacgacaatctgctgaagaaccccagcgagaaagtgcggggaaaactcgtgcggaccgtggaacggaagttctacaaagaggaactgaagcggatcatcagcaagcagaccgagttcatccccgagctgagagataaggccctgctggaagattgcatcagagagctgtacgcccggaacatccctcaccaggacagcctgaagaaaaaggacttcgtgtacctgatcgtggacgacctgctgttctaccagcggcctctgaagtccaagaagtccctgatcagcgattgcccctacgagagctacccctacgtggacaagagcaccggcgagatcaagacacagcacatcaaggtggtggccaagagcaacccttacttccaagagttccggctgtggcagttcatccagaacctgaggctgctggacagagagagcctgaacgaggacgatgtgaccgccaagtacctgcagacccctgaggactataccaagctgtaccagttcctgaacgaccggaaggccatcacacaagaacagctgctgaaggacttcttcggcctgaaaaagcccaagggcaaagacaccaagtacagcctgcggtggaactacgtcgaggacaaagaatacccctgcaacgagacaagatacctgatcctgagcgccctgaagaaggccgagatcgagcctagcttcctgaccagagagatggaacagagactgtggcacctcctgtacagcgtggaagataagaacgagctgattcacgccctcgagaagctgcagaaagagctggaactgcccaacagcttcgtggaagaactgaagaagattcccagcttcaagaaagagtacggcgcctacagcgagaaggccgtgaagaaactgctgagcgtgatgcggatgggcacctgttggagcgaagatggaatccccgccagcgtgaaagagcggatcagcaccattatcaagggcgaagctcaggacgtggccctggaaaaagccgccaatcagcacattagcctggccgagctgaaggattttcagggcctgcctgtgtggctggcctgttacgttgtgtacggcagacacagcgagagcagcgagatcaccagatgggagacacccgaggacctgatgatcttcatccgcaacttcaagcagtactccatgcggaaccccatcgtggaacagtgcgtgctggaaagcctgagaaccgtgcacgacatctgggttaagtacggccacatcgatgagattcacctggaactgggcagaaacatgaagtccaccgccgaggaaagagccagaatcagcgagagaaacctggccaacgagaacaccaatcagcggatcaagtatctgctgatggaactcaagaacgacggcaacatcagcgacgtgcggccttactctcccatgcagcaagagatcctgcggatctatgaggaaggcgccctgacagagctgagcagagaagatcctgatttcgccgagatctcccggattagcaagctggctcagcctaccagcagcgagctgacaaagtacaagctgtggctcgagcagcggtacagaagcccttataccggcaagcccattcctctgagcagactgtttacccctgcctaccagatcgagcacgtgatccctcagagccggttcttcaacgacagcctggtcaacaaagtgatctgcgaggccgaagtgaacggcctgaagtctaacatgctggggctcgagtttatcaaggcccacggcggagaagtggtgcactgtcctacactgggcaacgtgaccgtgttcaccgaggaacagtacaccaagttcgtgaaggaccactacagcgccaaccgggccaagctgaaaaacctcatgatggaagatatccccgaagagtttatccagcggcagatgaacgactcccggtacatctccagagtggtcaagcagctcctgagcaacgtcgtgcgggaagagaatgaagccgaggctaccagcaagaatctgatcccttgtaccggcggcatcaccgacagactgaaacaggactggggcctgaatgacatctggaacaaaatcgtgtcccctcggttccagaggatgaacgatctgacccagtccgatgccttcggccactgggaagataaggacggcaagaaggtgttccagaccaccatgcctctcgagctgcagagaggcttcagcaagaagagaatcgaccaccggcaccacgccatggatgccctggttattgccctggcctccagaaacatcgtgaactacctgaacaacgagagcgccaacgacgagaaactgcggcacgacctgaaacggctgctgtgtggaaaaggcggcgtgatcctgaagccttgggagacattcacccaggatgcctacaaagccctgcaggacatcgtggtgtccttcaagcactacatcagagtgatcaacaaggccagcaactactacgagcactatgacgagaatgggaagaaagtgactgtggcccagaaaggcgagagcatgtgggccattagaaagcccctgcacaaagaaaccgtgttcgcccacgtgaacctgagaagagtgaaggctatcccctttaacaaggctctggaaaaccccagcacaatcgtgaacaaggacctgaagcacctgatcaagaccctcatggaagatggcatggacaagaagaaggtcctcaacttctttaagaaagaggatgggctgaagttccacggccaggatatcagcaaagtcgaggtgtactacttcaccgacgacgtggaaaagatggtggctgtgcggaagcccctggacgatagcttcgacgccaagaaaatccagtccatcaccgataccggcatccagaaaatcctgctgaattacctggccaccaagtataacgaccccaaggtggcattcagccccgagggcatcatggaaatgaacgagcacatcgaagagttcaacggcggcaagcctcaccagcctatcctgaaagttcgggtgtccgagacactgggcgagaagtatcctgtcggctacggcagcaacaaggacaagaaatttgtggaagcccagagcgggaccaacctgtatttcgccatctacgagaacaaggccggcgaccggaactaccagacaatccctctgaacatcgtggccgaacggatgaagcagaacctgcctcctgtgcctggcgtgaacgagaacgacaaactgaagttctttctgagccccaacgacctggtgtacgtgccagaggaatctgaacagaacgccggaatcgacgaactgtacaaagaacggatctacaagttcgtcagcagcacaaagacccaggctttcttcatccccagcaacgtggccagcgtgctgatgaacaaagtggaatttcagtccctgaacaaagccgagcgggccatcgacggacagatgattaaggccgtgtgctggaagctcgaggtggacagactgggcaatatcgtgaagattatcaagtga

SEQ ID NO: 88 - DNA, 4086 bp, Artificial Sequence
  Synthetic sequence or sequence of unknown origin
atgaagagagtgctgggcctcgatctgggcaccacatctattggatgggccgttgtggatcaggccgccagccaagaggaaaagagcaagatcatccagctgggcgtcagagtgaaccccatcacagtggatgagcagagcagcttcgagaacggcaagagcatcaccaccaccgccgacagaacactgaagcggggcatgagaagaagcctgcagagatacaagcagcggagagaacacctcgtgggcctgctgaagaagcacggcatcatcaacgacgacaccctgctgaacgagaatggcaacgccaccaccttccagacctacagactgagagccaaggccgctcacgaggaaatcagcctggaagagtttgcccgggtgctgctgatgatcaacaagaagagaggctacaagagcaacagacgggccgactctcaagaggacggcgagctgattgatggaatggccgtggccaagaagctgtacaacgaacacctgacacctggcgagttcgcctaccacatcctgcagagcggcaagagattcatccccagcttctacagaagcgacctgcagaacgagttcgacaagatctggaactgccagaaccagttctaccctcaagtgctgaccgccgagctgaaggacaagctgaccgacagaagcaagaaggataccgagaacatcttcttcgccatccaccacatcagctccgccaccgtgaaggacagaaagaccgccacactgaccatctacaagtggcgcgttcaggccctgagacagcagctggatcttgaacaggttgtggccgtgctggcctctctgaatggtgctattgccggcgcttctggctacctgggccacatctccgacaacagcaaagagctgtacttcggccacatgaccgtgggcgagtatctgatgagaggcctggaacaggaccctcactttagagtgaagaaccgggtgttctataggcaggactacctgaatgagtttgagcagatctgggagacacagcggagatttcaccctgagctgacagctgaactgaaagagaagatccgggacaccgtgatcttctaccagcggaagctgaagtcccagaagggcctgatcgcctattgtgaactggaaggccgcgagatcacagtgaaggtggacggcaaagaaaagcgcgtgatgacaggccctaaagtgtgccccagatccatgcctctgtaccaagagttcaagatgtggcaagtcatcaacaacctgcggctgcagtccaagatcgatggcacacaggtgcccctgaccatggaacagaagaaactgctgcacgacgccctgaatgtggaaggcgatatgcaggccgctagagtgctgaaggtgctggccctgaagcctaaggactacggcatcaattgtgacgaggtgcccggcaacaccaccaacgctgccctgttcaaaaagtacaagtccatcgtggaatggaccggccacgacgtggaaaagttcgataagctgagcgccagcgagaagatcgccctggtggaatctgtgttcaaggccctcaagttcaataccgacttcctcggcgacggctgcgacgagcagtctaaggcttttagactgtggcatctgctgtactcctacgagggcgacaactccaacaccggcatcgacaagctggtggatcacatctgtagcctgacagccctgcctgccgattatgccaaagccgtggctcaagtgaagttcgacgacgactacggctctctgtccgccaaggccatcaagaaaatcctgccttacatgcagcagggcatgatgtactctgaggcctgtgaagccgccggataccggcacagcaaaagcagcctgacaagagaggaaatcgccgccaaacagctgctccagcatctggaagtgctgcccaagaacagcctgagaaaccccgtggtggaaaagatcctgaaccagatggtgcacgtggtcaacgcctgtcaggatgcctacggacccttcgacgagattcacgtggaaatggcccgggaactgaagctgaccagcaagcagagagaggaacggacaaaggccctgaatcagcggaccaaagagacagaagagattaagcagaagctgatcaaggacttcaacgtgccccatcctagccggaacgacatcatcaagtaccggctgtacatggaactggcccctaacggcttcaagaccctgtacaccgatacacccatcagccacgagaagctgttcacccgcgagttcaacatcgagcacatcatccctcaggccaagatgttcgacgatagcttcaccaacaagacactggaaaccgccgaggccaacctggacaagtctaagatgaccgcctacgactacgtgctgagcagacaaggcgaggaaggcgccaagcggtacaaggccaaaatcgagaaactgttcggcgccagcaatcccaagaagtgcgagagactgctgatgcgcgagacagatatccccgacggcttcctgaacagagatctgagcgacagccagtatatcgcccggaaggccaaagaaatgctgggcaagatcacaagagtggtggtgcctacaacaggcgccatcacagccagactgcgggaagattggcagatcgtggacgtgatgaaggaactgaacctcgagaagtatgagaagctcggactggtggaaacctacagcgacagagatggcagatgcgtgaagagaatcaaggattggagcaagcggaacgaccacagacaccatgccatggatgccctggccattgcctttacacagccctctcacattcagctgctgaaccacctgaatgcccacgagagcgacgacatcaaggccaacgcttacgccctgatgcggagaaccctgaccaaaggcggcacattcatcccacctatggaaaacttccggaccgtggctaagaaacacctggaagctgtgctggtgtccattaaggccaagaacaaggtggtcacccctcacgtgaacaggatcaagggatctgcccaccaccagctgacactgacacctagaggacagctgcacaaggactttttctacagcaagaagtacttttacgccaccaaggtcgagaaagtgggcaagagcttcaacgccgccaagatcgccacagtgtgcaagaaaacctaccgcgaggctctgctgcggagactgcaagaatatggcggagatcctgccaaggccttcaccggcaaaaactccctgctcaagaaccctctgtacgtggacgagagcaacatgaaggtggtccccagcaaagtgaaaaccgtcaccatggaagaatttttcagcaagcgcaacctggtggacaaggacctgaagattgacgacgtggtggacgagggcatcaaagagatcctgagaaagagactggacgagtacggcgacgtgaacgaggccttcgccaacctgagagacaaccccatttggttcaacaagcaggccgatatcgccgtgaaaagagtgaccaccaaagagcggatcacaaaccccatctacatccacgagaaacgggacaacgccggacggttcatcctggacgagaagggcaatagacggcccaacgacttcgtgaaccctcggaacaacaaccacgtggccatcttcgaggacgaggacggaaacctgcacgagcacattgtgtccctgtacgatgccgtgaacctggccagaaagggactgcctatcgtggacaaactgtacaacagcgacaaaggctggaagttcctgtacacaatgaagcgcaacgagctgttcgtggtgccagacctggaacacggctttaaccctgccgagatcgacctgatggacgtgaagaactaccccgccatctccaagcacctgtaccgggtgcagaagattaccaagaaggactacttcttcaagctgcacatcgataccaccagcgagtttcaggcccctctgaaggatatccactggaagcgcatcacaaaagagaacgacctgaagggcttcgtgaaagtgcgcgtggaccacatcggacatattgtggctgtgggagagtacaactga

SEQ ID NO: 89 - DNA, 3327 bp, Artificial Sequence
  Synthetic sequence or sequence of unknown origin
atgaagtacaagctgggcctcgatctgggcagcacatctcttggatgggccgctgtgaagctgaatgatgctggtgctgtggaacagctgctggacttcggagtgcggatcttccctgacggcagagatgccaagacacacgcccctatcaatgtcgtgcggagagccgccagaacaatgcggagaagaggcgatagagtgaagctgcggaagaaacgggtgctgcagctgatccggaagtacggcctggatttcgacatcagaagcaaccccatcctggaaaacccctacgagctgagagtcagagccctggaacacagactgagccctagcgaactgggcagagtgctgtttcatctggccctgagaaggggcttcaagagcaaccggaaagagacaaagggcgagaacggcggaaagctgaaagccgctacagatgccctggcctctacagtcggagatggcacactggctcagttccaggtgcagaccaagaagttccggttcagcaaccagttcgacggcaacgtgatcaaggacggcgccctgtatcctaccagagacatgtacctggacgagttccaccggatctgtgacgcccagggactcgacaaagagatgagggccgccttcgagaacgccatctttttccagcggcctctgatccctcctgtcgtgggcacatgtatttttgccgccggacagcccagggctcacaagtttgaacccgtgtttcagagatggcgggctctgcagcagctgaaccagctggccattctggacaacggacagaacgtggccctgaccgatcagcagagacagtgcctggtggacatcctgctgtacaacttcaacggcgtgaagagagacagaggcggccgagtgaagatcaccttcgccgagattaagaagcagctgggactgagccggaccgtgaagttcaatctggaaagcgagcagcggaaagaactgaacgtggacagcaccggcttcagcttcgccgaaatcggagagctggacttttggagaagcctgaccgacgagcagcagagcgacgtgctgaacaagatcaacgacgaccagaccgaggacgccgagctgattgaatacctggtggcccactatggcctgagcgcctctagagccagagccatcatcgacatccctctggaagatgacgtggccaatgtgtccgtggtggccatgaagaagatgctgcctttcctggaaggcggacagctgtatcacctggccgtgcattctgccggctatcactatggcgaacaggacgtgcccctgatggacaagctgccttactacggcgacctggatgtgctgaagcctagcctgatgcctgccagagatggggcctacagaaccatgaacgccaccgtgcacattgccatgaaccagatcagagtggtggtcaacgacctgatcgagagatacggcagaccctgcgccatcaacatcgagcttggaagggacgtccgcgctggcgccaaagaaagagcagaactggataagcagcagtccgccaacaagcggaagaacgatgccattagagccgagctggccgagatcggcatcctgaatccaagcagagaggacttccagaagtataagctctgggagaatctggcccctcagcctcagaatcggagatgtgtgtataccggcgagcccatcactagcctggccgctctgtttaagagcggcagattcgagatcgagcacatcctgcctttcgctcagaccctggatgacagcctggccaacaagacaattagcgccgtggccgccaaccggttcaagggaaatagatctcctgccgaggccttcgacgatcctgcctctccttgggcttatgccgatgtgtgggctagagcccagaatctgcctgatggaagccgttggagattcgaccgggacgccatggaaaagttcaccagacacggcgactgcattgcccgggctctgaacgatacccggtttatgagcgtgatggccgtgaactacctgaagcacatctgcagcgacaagaacaaagtgcggggactgcctggcagactgaccgccatttttagggacatgtggcacctggactggtggaagaaccacgacgacgccgatacctacagagcctctcacatccaccacgccatcgatgccttcgtgattgcctgtatgggagccggcaatctgcagaagctggctgaaaacgccacacacctggaagatttccacggcaagacactgaaagagaagcacagacagctgttcgccgatatgtacctgccatttcctgagttcgactactacgacttcagaatgagatgcgaggcctgcgtgatcagctacagaccctctgtgaaagagcctgccgccagcgatacagtgggatgtctgcacgaggataccgcctacaagctcgagaagttcgagacaggcacccgggccaccatgagcagaagaattgctctgcctaccaccgccgatgccagggccaagttcaagaaggacttcgactctctgaaccccaagactctggaaatgttcctggccgaaaccggcgtggccaacgacgccaatgatatcgccgaccagttcctgaattggtgccagatgcggggcatcaagaaagtgcggatgttcaagaccagagtggacaccaccacctacgtgcccgtgttcagaaacaggggcgataagaacgccttcaacagagcctggacagagtggtacgccgctgccggaattgccagaggaatgacagagcctaaggccaagaaggcccagcaagagaaagagagaaggctgctggccctgtaccagaatgccgccgctagagcctacaagtggttcgtgtccggcaacaacttctgcgccgacatcttcgagatccgcagcgacgacagaagatatcctgctctggctggccagtggcagagcgagatcatcagcaattactgcgccacactgaacaacggcacccctatgtggcggtgcaaatacgccaccgctcggagagtgatgcggctgagaatcaacgacatggtcatggccgagttcagccgggacaatgtgcctctgctgaaaggactcgaggatgccgttagacatcagctggctgtgcaggacaccgacaccgtgaacatcatcttccgcgtgaagaaaatcagcagcaacggggccatcttcctgcggcctcactacattgccaaagaggacgctgacaccaagacctggcaggccaatgctaccagcctgcagaagtacaaagcccggaagatcagggtgtcccctaccggcaaagtgctggaatga

SEQ ID NO: 90 - DNA, 4047 bp, Artificial Sequence
  Synthetic sequence or sequence of unknown origin
atgtctatcaagagcgactacttcctgggcctcgacatcggcacagattctatcggatgggccgtgacagaccccgagtaccacatcctgagaagaaagggcaaagccctgtggggcatcagactgttcgatgccgccaatactgccgccgagagaagaaccttccggaccagcagaagaagaatccagcggcggagacagcggatcagactgctgcaagagctgttcgccgaggaaatggttaagctggaccccggcttcttccagagactgagcgatagcgccttctggcaagaggacaagcaagagcagcagatctacagcctgtttacctgcgagaactacaccgacgtggactactacagagagtaccccaccatctaccacctgagaagcgccctgatccaagagaaaaaagagttcgacctgcggctgctgtatctggccctgcaccatctgatgaagcaccggggccactttctgttcaacggcagcatcaacaacgtgaccagcttccacaccaccttccagaccttcgccgactgcctgtacgacgagttcgacatcgagctggaatgcgacagcgaggacagattcgccgagatcctgaaggataagcacgccagaaagaccggcaagtgctctgagctggaaatcatctgccacatcgagaagtccaacaagcagctgaaagaactgttcaagctgatcaccggcatgaaggccagcctgagcgtggtgtttggagatgatgagctggccgagatcgagcacaacaagatcagcttcagcgagagcagctacgacgaagtgcggctggccctggaagatgagattcaagagagaaccggcatcctggacatcttccacgccgtgtattcttgggccatcctggccgatattctggaaggcggcgagtacgagggcaacagctatctgtctgtggccaaggtgtccacctacaagaagcacggcgacgacctgagactgctgagaacactcgtgcgcgagtactgccccgaccactacaagagctttttcagcgtgtccggcaaagagaactactgcgcctacgccggcacactgaagaagaacggcaagaagcagcccatcaagcggtgcagccaagaggacttctacaaggccctgaagaaactgctgaaccagatgcctaccgagcagcccgaagtgaaggatatcttcatcgagattgagaacggcaccttcctgcctctgcaagtgtccaaggacaacggcgtgatcccctaccaagtgaacaagatggaactcgagaagatcctgcagaacgccgaagagtacctgcctttcctgaagaacatcgacgaggaatgcggcaagaccgtgtccaagaagatcatcgacctgttcgagttcagaatcccctactacgtgggccctctgaataccgccaagggcgagaattgctggatggttcgaaaagaggccggcagaatctacccctggaacttcgatgagaaggtggacagagatcagagcgccgagaagttcatcagacggatgaccaaccagtgcacctacctgatccacgaggacgtggtgcctaagaacagcctgctgtactccgagttcatggtgctgaacgagctgaacaatgtgaagattcggagcgagaagctgcccgtggaactgaagcaggccatcgtgctggacctgtttaagaagcagaagcagatcacagggaagaagctgctcaactacctgaacgccaacggctacgacgtgaagaaagaggacctgagcggcttcgacggcaacttcaagtccagcctgtccagctacctgactctgaagaaggtgttcggagaggaactggacaagtacagcgtgcagcagatggccgaggacatcatcctgtggatcaccctgtatggcgacgatcagaaaatgctgcggagagtgatccggaagcactacgagcagcagctgtctgaggaacagatcctgagcctgagcaagctgaagttccaaggctggggcagactgtctagacggctgctctctgaaatggaaggcgtggactgtgaaaccggcgagtgcatgacagtgatgcagggcctgagaaacacccagaacaacctgatgcagctgctgagccagcagttcagcttcatggaactgatcgaggaagagaacgggaactactacgtcgacgagatcacctacgacaacctggtcaaggacatggtcatcagccctagcgtgaaaagggccgtgtggcagacagtgcagatcgtggaagaaatcaagggcgtgatgggatgccagcctaagaaaatcttcgtggaaatggcccgcagcgacgaagagaagaaacggaccgtgtctcggaaggatcggctgctggaagcctacgacgccatcaaggatgaggcccggcaatggcaagaagaactgcagaaatactccgacggcgatttcaaggccatcaagctgtacctgtactacacccagatgggccagtgcatgtacaccggcagaaaaatcgatctgtcccagctgaacgacgccaccgtgtgggatagagatcacatctaccctcagagcaagaccaaggacgacagcctggacaatctggtgctggtggatagatccgtgaatgccaagaaaagcgacggcatgctgagccccgagatccagcagagaatgagagccacctggaagtacctgaaagaaaagaagctcatcagcgagaagaagtacgagcggctgaccagagtgtcccctctgacagatgaagaactggccggcttcatcaaccggcagctggtggaaacaagacagagcagcaaagccgtggccacactgctgaagagggtgtacgatgaggccgagattgtgtatgtgaaggccgaggccgtgtctaacttccggcgggataacctggactacatcaaagtgcgggacctgaacgactaccaccacgccaaggacgcctaccagaacatcgtcgtgggcaacgtgttccacgagaagtttaccagcaatcccctgcggtggctgaaaaacaaccccaacaccaagtactccctcaaccagatgttcaacttcgacctggaaaagaacggcgtggtcatctggaagagaggcaaggccggctccattaagtgtgtggaagagacactgaagcggaacgacatcctgttcaccagatacgctttctgcaacaaaggcggcttctttaatcagatgctgaccgccgctccagaggataagacaaaggccaaaggcctggtgcctatcaagaaaggcatggaaacctggaaatacggcggctacaccagcgtgacccctagccactttatgctggtggccagcaaggacaagaagggaaaagagatccggaccatcgagacagtgcccctgtaccggtggaaagagttcaaagagaatcccgacgctctgctccagtactgcagagagttctacggcctgaaagagcccaaggttctgatcccttgcatcaagaagaatgcccggctggtcgtgaacggcttccctatgcacctgaagggcagcaccggaaaacagctgattctgcagggtgccgtgcagctgtgcctgaacaacgagaacatcaagtacctcaagaaagtgacgaagtacctcgagtacaacgcccagcggagagacaagagaaccctgctcgaagttcgggaagtgaccggaatcaacaaagaggaaaacatccagctgtacgatgtgttcgtggacaagctgagcaacacaatctaccagtacagacccgccaatcctaaggacaacctcatcaagggccgcgagaaattcatcgagcttggcctggctgagcagtgcgtggtgctgggagaagtgctgcatctgttccagtgcaagcccctgaccagcgatctgacactgatcggcggaagccctaacaccggcaccatcaagatcaccaagaccatcagcaactgcaacgtggtcaagctgctgtcccagtctatcgccggcgtgaaagtccgcgagatcaacctgctgatcatctga

SEQ ID NO: 91 - DNA, 3327 bp, Artificial Sequence
  Synthetic sequence or sequence of unknown origin
atgaagtacaagctgggcctcgatctgggcagcacatctcttggatgggccgctgtgaagctgaatgatgctggtgctgtggaacagctgctggacttcggagtgcggatcttccctgacggcagagatgccaagacacacgcccctatcaatgtcgtgcggagagccgccagaacaatgcggagaagaggcgatagagtgaagctgcggaagaaacgggtgctgcagctgatccggaagtacggcctggatttcgacatcagaagcaaccccatcctggaaaacccctacgagctgagagtcagagccctggaacacagactgagccctagcgaactgggcagagtgctgtttcatctggccctgagaaggggcttcaagagcaaccggaaagagacaaagggcgagaacggcggaaagctgaaagccgctacagatgcccttgcctctgccgttggagatggcacactggctcagttccaggtgcagaccaagaagttccggttcagcaaccagttcgacggcaacgtgatcaaggacggcgccctgtatcctaccagagacatgtacctggacgagttccaccggatctgtgacgcccagggactcgacaaagagatgagggccgccttcgagaacgccatctttttccagcggcctctgatccctcctgtcgtgggcacatgtatttttgccgccggacagcccagggctcacaagtttgaacccgtgtttcagagatggcgggctctgcagcagctgaaccagctggccattctggacaacggacagaacgtggccctgaccgatcagcagagacagtgcctggtggacatcctgctgtacaacttcaacggcgtgaagagagacagaggcggccgagtgaagatcaccttcgccgagattaagaagcagctgggactgagccggaccgtgaagttcaatctggaaagcgagcagcggaaagaactgaacgtggacagcaccggcttcagcttcgccgaaatcggagagctggacttttggagaagcctgaccgacgagcagcagagcgacgtgctgaacaagatcaacgacgaccagaccgaggacgccgagctgattgaatacctggtggcccactatggcctgagcgcctctagagccagagccatcatcgacatccctctggaagatgacgtggccaatgtgtccgtggtggccatgaagaagatgctgcctttcctggaaggcggacagctgtatcacctggccgtgcattctgccggctatcactatggcgaacaggacgtgcccctgatggacaagctgccttactacggcgacctggatgtgctgaagcctagcctgatgcctgccagagatggggcctacagaaccatgaacgccaccgtgcacattgccatgaaccagatcagagtggtggtcaacgacctgatcgagagatacggcagaccctgcgccatcaacatcgagcttggaagggacgtccgcgctggcgccaaagaaagagcagaactggataagcagcagtccgccaacaagcggaagaacgatgccattagagccgagctggccgagatcggcatcctgaatccaagcagagaggacttccagaagtataagctctgggagaatctggcccctcagcctcagaatcggagatgtgtgtataccggcgagcccatcactagcctggccgctctgtttaagagcggcagattcgagatcgagcacatcctgcctttcgctcagaccctggatgacagcctggccaacaagacaattagcgccgtggccgccaaccggttcaagggaaatagatctcctgccgaggccttcgacgatcctgcctctccttgggcttatgccgatgtgtgggctagagcccagaatctgcctgatggaagccgttggcgcttcgacagggacgccatggaaaagttcacccggcacggcgattgcattgctagggccctgaacgacacccggtttatgagcgtgatggccgtgaactacctgaagcacatctgcagcgacaagaacaaagtgcggggactgcctggcagactgaccgccatttttagggacatgtggcacctggactggtggaagaaccacgacgacgccgatacctacagagcctctcacatccaccacgccatcgatgccttcgtgattgcctgtatgggagccggcaatctgcagaagctggctgaaaacgccacacacctggaagatttccacggcaagacactgaaagagaagcacagacagctgttcgccgatatgtacctgccatttcctgagttcgactactacgacttcagaatgagatgcgaggcctgcgtgatcagctacagaccctctgtgaaagagcctgccgccagcgatacagtgggatgtctgcacgaggataccgcctacaagctcgagaagttcgagacaggcacccgggccaccatgagcagaagaattgctctgcctaccaccgccgatgccagggccaagttcaagaaggacttcgactctctgaaccccaagactctggaaatgttcctggccgaaaccggcgtggccaacgacgccaatgatatcgccgaccagttcctgaattggtgccagatgcggggcatcaagaaagtgcggatgttcaagaccagagtggacaccaccacctacgtgcccgtgttcagaaacaggggcgataagaacgccttcaacagagcctggacagagtggtacgccgctgccggaattgccagaggaatgacagagcctaaggccaagaaggcccagcaagagaaagagagaaggctgctggccctgtaccagaatgccgccgctagagcctacaagtggttcgtgtccggcaacaacttctgcgccgacatcttcgagatccgcagcgacgacagaagatatcctgctctggctggccagtggcagagcgagatcatcagcaattactgcgccacactgaacaacggcacccctatgtggcggtgcaaatacgccaccgctcggagagtgatgcggctgagaatcaacgacatggtcatggccgagttcagccgggacaatgtgcctctgctgaaaggactcgaggatgccgttagacatcagctggctgtgcaggacaccgacaccgtgaacatcatcttccgcgtgaagaaaatcagcagcaacggggccatcttcctgcggcctcactacattgccaaagaggacgctgacaccaagacatggaaggccaatgccaccagcctgcagaagtacaaagcccggaagatcagggtgtcccctaccggcaaagtgctggaatga

SEQ ID NO: 92 - DNA, 3327 bp, Artificial Sequence
  Synthetic sequence or sequence of unknown origin
atgaagtacaagctgggcctcgatctgggcagcacatctcttggatgggccgctgtgaagctgaatgatgctggtgctgtggaacagctgctggacttcggagtgcggatcttccctgacggcagagatgccaagacacacgcccctatcaatgtcgtgcggagagccgccagaacaatgcggagaagaggcgatagagtgaagctgcggaagaaacgggtgctgcagctgatccggaagtacggcctggatttcgacatcagaagcaaccccatcctggaaaacccctacgagctgagagtcagagccctggaacacagactgagccctagcgaactgggcagagtgctgtttcatctggccctgagaaggggcttcaagagcaaccggaaagagacaaagggcgagaacggcggaaagctgaaagccgctacagatgcccttgcctctgccgttggagatggcacactggctcagttccaggtgcagaccaagaagttccggttcagcaaccagttcgacggcaacgtgatcaaggacggcgccctgtatcctaccagagacatgtacctggacgagttccaccggatctgtgacgcccagggactcgacaaagagatgagggccgccttcgagaacgccatctttttccagcggcctctgatccctcctgtcgtgggcacatgtatttttgccgccggacagcccagggctcacaagtttgaacccgtgtttcagagatggcgggctctgcagcagctgaaccagctggccattctggacaacggacagaacgtggccctgaccgatcagcagagacagtgcctggtggacatcctgctgtacaacttcaacggcgtgaagagagacagaggcggccgagtgaagatcaccttcgccgagattaagaagcagctgggactgagccggaccgtgaagttcaatctggaaagcgagcagcggaaagaactgaacgtggacagcaccggcttcagcttcgccgaaatcggagagctggacttttggagaagcctgaccgacgagcagcagagcgacgtgctgaacaagatcaacgacgaccagaccgaggacgccgagctgattgaatacctggtggcccactatggcctgagcgcctctagagccagagccatcatcgacatccctctggaagatgacgtggccaatgtgtccgtggtggccatgaagaagatgctgcctttcctggaaggcggacagctgtatcacctggccgtgcattctgccggctatcactatggcgaacaggacgtgcccctgatggacaagctgccttactacggcgacctggatgtgctgaagcctagcctgatgcctgccagagatggggcctacagaaccatgaacgccaccgtgcacattgccatgaaccagatcagagtggtggtcaacgacctgatcgagagatacggcagaccctgcgccatcaacatcgagcttggaagggacgtccgcgctggcgccaaagaaagagcagaactggataagcagcagtccgccaacaagcggaagaacgatgccattagagccgagctggccgagatcggcatcctgaatccaagcagagaggacttccagaagtataagctctgggagaatctggcccctcagcctcagaatcggagatgtgtgtataccggcgagcccatcactagcctggccgctctgtttaagagcggcagattcgagatcgagcacatcctgcctttcgctcagaccctggatgacagcctggccaacaagacaattagcgccgtggccgccaaccggttcaagggaaatagatctcctgccgaggccttcgacgatcctgcctctccttgggcttatgccgatgtgtgggctagagcccagaatctgcctgatggaagccgttggcgcttcgacagggacgccatggaaaagttcacccggcacggcgattgcattgctagggccctgaacgacacccggtttatgagcgtgatggccgtgaactacctgaagcacatctgcagcgacaagaacaaagtgcggggactgcctggcagactgaccgccatttttagggacatgtggcacctggactggtggaagaaccacgacgacgccgatacctacagagcctctcacatccaccacgccatcgatgccttcgtgattgcctgtatgggagccggcaatctgcagaagctggctgaaaacgccacacacctggaagatttccacggcaagacactgaaagagaagcacagacagctgttcgccgatatgtacctgccatttcctgagttcgactactacgacttcagaatgagatgcgaggcctgcgtgatcagctacagaccctctgtgaaagagcctgccgccagcgatacagtgggatgtctgcacgaggataccgcctacaagctcgagaagttcgagacaggcacccgggccaccatgagcagaagaattgctctgcctaccaccgccgatgccagggccaagttcaagaaggacttcgactctctgaaccccaagactctggaaatgttcctggccgaaaccggcgtggccaacgacgccaatgatatcgccgaccagttcctgaattggtgccagatgcggggcatcaagaaagtgcggatgttcaagaccagagtggacaccaccacctacgtgcccgtgttcagaaacaggggcgataagaacgccttcaacagagcctggacagagtggtacgccgctgccggaattgccagaggaatgacagagcctaaggccaagaaggcccagcaagagaaagagagaaggctgctggccctgtaccagaatgccgccgctagagcctacaagtggttcgtgtccggcaacaacttctgcgccgacatcttcgagatccgcagcgacgacagaagatatcctgctctggctggccagtggcagagcgagatcatcagcaattactgcgccacactgaacaacggcacccctatgtggcggtgcaaatacgccaccgctcggagagtgatgcggctgagaatcaacgacatggtcatggccgagttcagccgggacaatgtgcctctgctgaaaggactcgaggatgccgttagacatcagctggctgtgcaggacaccgacaccgtgaacatcatcttccgcgtgaagaaaatcagcagcaacggggccatcttcctgcggcctcactacattgccaaagaggacgctgaccctaagacctggcaggccaatgctaccagcctgcagaagtacaaagcccggaagatcagggtgtcccctaccggcaaagtgctggaatga

SEQ ID NO: 93 - DNA, 4044 bp, Artificial Sequence
  Synthetic sequence or sequence of unknown origin
atgatcaatcaagagtacttcctgggcctcgacatcggcacagattctgttggatgggccgctgccaacagcgagtaccacatcatcaagaagaacggcaaggccctgtggggcgtcagactgtttgattctgcccagacagccgccgagcggagagagtatagaatcgccagacggcggatcgagcggaggaaacaaagactggcttggctgcaggatcagttcgccgccgagatcgccaagaaggaccctgccttctttagacggctgcaagagagcaagttcctggaagaggacaagcagagcaatcacccactgggcagatacaccctgttcgccgacagaaactactgcgacaaggactactaccgggactaccccaccgtgtaccacctgagaaagaaactgatggaacagcccggacctttcgacgtgcggctggtttatctggccctgcaccacattatgaagtaccggggccacttcctgtacggcgatctggccatggatagcatcagcctgaaggccggcatggacagactgaaccacgtgctggaacaagagttcgagtacaagctggaagtgtccaacatggaagccctgaaagaggtgctgatctcccggaagggcagcaagacatggcggaagaaatgtctggccgagctgctgagcgtggaaaagcgggaagatcagatgggattcgccctggctgaactgctggctggatcttctgttcccctggatgccctgtttggagatggcaccgccaccgaggacttcaagaaaatcagcctggaagatgacttcgaggaaatcgtgcccaaactggaagccgctctgggcgatagaattgaagtggtgctggccgccaagggaatccatgattgggccctgctggaaaccatgagagatggcgagagatatatcagcagcgccaaagtgaagtcctaccagaagcacgaggacgatctgaccctgctgaaaacagtcgtgcggcagctgaacgaccgggacatgtacagagagatcttccacaccgccagagagaagctgaacaactaccctgcctacagcggcaaggacgccaatggctgtagatgcggctacgacgacttcagaaagtacctgaccggcaagctgaagccctacaaggacctgtacagcgacatccctgccatcctgtctgagctggaacagggcacatttctgcccctgcagaccaccaaggacaacggcgttatccctcaccagctgcacgaggaagaactggtcaagatcctgggcaacgccagcgcctatctgccctttctgacacaagtggatgagagcggcctgaccaaggccgagcagatccaccggatcttttgcttcagaatcccctactacgtgggacccctggacagcagatctgagcattcttgggtcgtgcgcaagaacgacaaggtgtacccctggaacttcgaacaggtggtggacctggaagcctgcagacggaacttcatcgagagaatgacccggaagtgctcctacatcggagagcctgtgctgccccagaatagcctgctgtacaccagattccaggtgctgaacgaactgaacaacctgaaagtgaacggcgagggcatcagcgtggcccagaaacaggccatctaccacgatctgtgcctgagcggaaagaaggtgtccctgagcaagctgcggaactacctgaacctggacaagaacgatgagatcaccggcatcgatggcgacctgaagggaacactgagcccttggaaacactacgcctggctgatcaagcagcctggcggatacgagatcacagaggacatcatcagacagatcacactgtttggcgacgaccggaagctgctggccaactggctgcacaagacatacggcaacaagctgaccagagaggaagagaaactggccctgagattccagtgtagcggctggggtagactgagcagagccttcctgacagagatctatcacggcgagtctagcacaggcgaggccatgagcatcatggacatgctgtgggagacaaactacaacctcatggaactgctgagcagcagattcgactttgccggcgctgtgcaggcctatagagaagcccacctgaaccagtacatgagcctgcaggattacctggacgagagctacgcctctcctggcatcaagagggccatccaccaagtgatgggcatcgtgaacgagctggaaggcatcctgaagtgccctccaaagcgggtgttcgtggaagtggctagagagcacggcgagaagggcaagagaaccatcagcagaaagaatgagctgctcgccctgtaccagaaatgcggcgaggaatgcgacgaactcttccagcagctgtctgacgagcctgagggcagcctgagaagagataagctgtacctgtactacacccagaaaggccggtgcatgtactccggcgagcctatcaatctgagcgagctggactccggctacgatatcgaccacatctaccctcagagcaagaccaaggacgactccatccagaaccgggtgctcgtgaagagggaactgaacgccgtgaagtccgacaattaccccattgccgccgacatcagaatgaagatgcggcccttctggacaaagctggaaagagccggcctgatcagcaaagagaagtaccaccggctgacccggtctaccgagttttctgccgaagaacaggccggattcatcagccgccagctggtggaaacacggcagagcagcaaaatcgtggccgaactgctcaagcagagatttggcagccacaccgagatcgtgtacgtgaaagccggcaacgtgtccagctttcggcaggaccagagactgacaaaggacggccagcagaaacaagccggccagtgcaagcagaatgagcagaccgttcaggaccctctgtttgtgaagtgccgggaagtgaacgacttccaccacgccaaggatgcctacctgaatatcgtcgtgggcaatgtgtaccacgtgaagttcaccagaaatcccgccaacttcctgcgcgagaagaatgccaagttcagcctgagccggatgttcgacttcgatgtgtccagaggcgaggatgtggcttggagagctggacctgagggatctattgccattgtgcggcacaccatgcggaagaacaacatcctgtttaccagaagaagcgccgaggccacaggcggactgttcgatcagatgatcgtgcctaaaggcaaaggacaggcccctgtgaaggccagcgatcccagaatgtccatcgagaagttcggcggctacaacaaactgaccggcgcctacttcatcctggtggaacataccgccaagaaaaagagagtgcggagcctggaaaccgtgctgctgatgtacaaagagaaatacgaggccgctcctgagacatactgctgcgagattctgggcctgcaagagcccaaagtgctgatccccagaatcaagatcaacaccctggtgtcctacgacggcttccggatgcacataagcggcagaaccggcgaccggatcatctacaagaacgccaaccagctcgtgatgcctcctgactggcagcagtacatcaagaacatctccaagtacctggaacggtgcagaaccgccggcagagaactggaactgaccaccttcgatggcatcaccgacgaggccaacctgacactgtatcggctgctgctcgaaaagctcgagaacggccggtacagagtgaagtacgaaacccctgctcagaccctgtgcagctgctccgagaagtttagaaggctgtccgtgcctgaccagtgcagaatcctgatgcagatcctgaatctgttcgccaataccgccgcctccgccgacctgaaactgctgaatggaaaggctggcatcggcatcctgctgaccagcaagaacctggataactacaggggccacagcttcaagctgatccaccagtccatcaccggattcttcgagcaagagatcgacctgatgggcgagatgctgagctga

SEQ ID NO: 94 - DNA, 3990 bp, Artificial Sequence
  Synthetic sequence or sequence of unknown origin
atgaagaactactacgtgggcatcgacatgggcaccaattctgttggatgggccgccaccgattgcgagtaccatctgctgaaagccagaggccaggatctgtggggcagctacctgtttgatgaagccgaaggcgcccagaagcggagaagctttagaaccgccagaagaaggaccgccaggaccagacaaagactgctgctgctccagagcctgttccaagaggaaatggccaagaaagaccctctgttcttcatccgcctgaacaacagccctctggtgctgaaggacaagaacgagagcctgaaaaccagcgacagcctgttcgccgaccagagcttcaccgacaagaattacttcaagaagtaccccaccatctaccacctgagagccagcctgatcaacgacaagatcaccgacgtgcggctgctgtatctggccgtgcaccacatcatcaagaaccggggccacttcctgttcgagagccagaacttcaacgtggccaacgaggaagtggtcaaggacaagttcttcgccatcaacgcctttctgagcgacagagagatgcccacactgaacctggaaagactgcacgaggtgctgcaggtcctgaagcagaccaagagcagcaagcgggacaagcagaaaacactgggcgagctgctgggcgtgtccaaagagaagcctctgacctctatcgtgaaggccctgatcggcggcaccgtgtctctgaaggatctgtacagcgccgagagcgacttcgacgatatcaagagcttctgcttcgacaaggcctccttcgaggatctggacctgcctgccattaagagcgccgtgggagaagatgatgccgagctggttctgctgctgaagtccgtgtacgattggaccgtgctgtgtggcatcatgggcgacgaagagtacatcagcttcgccaaagtgaagatctacaacaagcacaagagcgacctcgtgtggctgaagaattacgtgcggcagaacttctccaaagaaacctacaacgaggtgttccggcggaaggataagaagaacaattacgccgcctacatcggcatggacaaacagaaaggcttcagcaagtgcaagcaagaggacttctacgccttcctgaagaagcggctgaacatcaccgatgagacagtgctggccgagatggacaagggccagttcctgcctaagcaagtgatcaagaccaacggcgtggtgccctaccagctgcatctgctggaactgaaggccatcctgcggaacgcccagaaatacttcagcttcctgagcgagaaacaagagggcgtgaccgtggccgagaagatcgtgtccctgatgaccttcagaatcccctactatgtgggccctctgaacaccgcctccaagaaatatgcctgggccgtgcgcagacctggctacgagaatgtgtctatcaccccttggaacttccaccagatcgtggatggcgacgccagcgaggaacagttcatcagacggatgaccaacaagtgcacctacctcgtcggacaggatgtgctgccagccaatagcctgctgtactccgagtacgtgttcctgaacgagctgaacaacctgcggatcaacggcgagaaaaacaacaaggcccggcagctgatcttccactacgccaagcagcacaaaagagtgaccctgaagaactgtctggccctgctcgtcagaaatggcctgctgcctgccgatagcagcatggatgtgtttagcggcctggacggcgacttcaagacaagcctgagcacttggtacgacttccggttcctgggcgatagactgcagacccagagggaaatgtgcgagcagatcatcctgtggatcaccctgatcagcgataagaaccggctggaaaagcggatcagaaccgcctacggccagtacctgagcgacgaggaaatcaagagaatcaagggcttcaactactctaagtggggcagactgagcaagatcctgctggatggcatcgtgtccgagcggtgctttgatgagaatggcgaactgctgaccatcatcgaggccatgagacaaaagggcgagaacttcatgcagctgctgagcgataagtacggcttccaggacgccatcgagcggtacaatcaagaaaacagccccagcgacgacaaggtgtcctaccagaccgtcgaggacctgtactgtagccctagcgtgaagagagccatctggcggacagtggaaatcgtgcgcgagatcgtgaagatccagggctgtgcccctcagaagctgttcctggaaacagccagagagacaaaggacaacggcaaggccggcaagagaaccgtgtctagaaagcagcagctcctggacctgtataaggacatccatctgcagcagcacgactggatcaaagagatcgagtctctgcccgacagcaagttcaacagcgaccggctggtgctgtactacagacagctgggcagatccatgtacagcggcaagcccatcaagctggaagaggtgttcgaccggaacatctgcgacatcgaccacatctaccctcagtccaagatcaaggacgactccctggacaacagagtgctggtgtacaagaatgagaacagcgtgaagtccgacaagtaccctatcagcagcgaagtgcgcaacgccatgaggcctttttggcagtctctgtgggtgcagggcctgatctccgagagaaagtaccagcggctgatccggtctacccctctgacagtggatgagctggccgacttcatcaaccggcagctcgtgatcaccagacagagcacaaaggccaccgctcagatcctgaaacagattctgcccgatacagagatcgtgtacaccaaggccgccaacgccaacgagttcaaagacaagaacaacctcctgaaagtgcgcgagctgaatgacctgcaccatgccaaggatgcctacatcaacatcgtcgtgggcaacgtgtacaacacgaagttcaaccacaacgccgccgtgttcttcagaaacaacagcatcgacagctacaacttcaacaagctgtacgagagcgatatccctggcgcttggagagtggcccagaaagcagatgtgctggccaccttccagaagaatacctgcaaggtcgtgcggatgaccgtgaatggacatggcgccctgttcgacgtgaaccctgtggtggccggaaagaacgctgatctggtgcctctgaaaaagcacggcgccattgccgatacaagcagatacggcggctacaacagcgccaagattgtgtacttcgtgctcgtgcgctctgacggaaaggccggaaaacagctgctgtccctggaaccttggcctctgtggatggaaaagcagacaggcggcagcaccgaggccaagctgaactactttagccagaagctgacaaaccccaagatctgcatcgatcggatcaagcagaacaccctgctgtgcgtgaacggcagctatgcctggctgaagggaaagaccaacaacaatgtgtccctgtgcaacgccaatcagctgtttctggacggggagaacgtgcagaccctgaaactgatcagcaactacatgcgggacaaaaagaccttcaacaaccctcagatgcccgccaatgagaagatcacagccgagaacaatctgcggctgtacgacgccctggtgcagaaactgtctagctctctgtatgccggcctggccatttgcggacaggtgccctttctgcaagagaagaggcctgtgtttgccagcctgtccgtggaaaaacagtgctgcgtgctgtgggaagtgctgagactgatgcagtgcaacgtgggcagcagcgatttcacacttctcggcggagtggccaatgccgggaagattaccctgaacaagttcatccaggacgagaacatcaagctcatctttcagagccccaccggctactacagaaccgtggtggatgtgggcagattcctgaagtga

SEQ ID NO: 95 - DNA, 4092 bp, Artificial Sequence
  Synthetic sequence or sequence of unknown origin
atgaagaaaacccgcgaggactactactggggcgtcgacatcggcacaaattctgttggctgggccgtgaccgacgagaactacagactcgtgcggttcaacggcaagaccatgtggggcagcagactgtttgatgaggcccagacagccgagaagcggagactgtctagaaccctgagaagaaggctgcagcggagaagatggcggatcgagctgctgcaagagctgttcagcgaagagatctgcaaggtggaccccggcttcttccagagactgaaggatagcaccttcctgcctgaggacaagcagagccaccagaccaacacactgttctacgacaccaactacaccgacgtcgagttccacagagagtaccccaccatctaccacctgagaaaagagctgatccagaacgtcgagaagaaagacatccggctgatctacctggccgctcaccacatcctgaagcacagaggccactttctgttctccggcaccatcgagaatgccaccagcttcgagtgcgccttcgacaagatgagccagtgcatccgggacgagttcgagattgagctgaactgcaacatcaagatggaccagggcaagatggatgacctgaagaagatcatccaggacaagaagctgagcaagagagacaaggccagccagttcctggaatacctgcagtacgacgacaaagagaagcagaagcagatcaaggccatcgtgtccctgatctgcggctctaagtgcaagctggccgacatcttcagcgacgagacactgaaggacgccgagagaagctccatcagcttcagcgagagcagcttcgacgagatcagacccgagctggaagatctgctccaagaaagatgcggcgtgctggatatcctgaagggcgtgtacgattggagcatcctggccgatattctgaaaggcggcgagcacaacggcaacagctatctgtctctggccaaggtgcacatctacaagaagcaccagaaggacctgttcgagctgaagaaactgatccggacctacgccgacgaccagtaccagagcttctttcagaaggccgacagcagctccagcaagaactactgcaactacatcggcagcaccagacggaatggcaagcggcactctgtgaagaagtgcacctacgaggaactgaccaagaccatcaagaacatcttcaccaacattcagcaccccgacgctcagaaccggatcgagaagattaagatggaactggacgccggcacctacctgccactgcaagtgtccaaggacaacagcgtgatcccctaccaggtgcacgacatcgaactgaaaaagatcctcgagaacgccaagaaacactacacctttctgaacaagaaggacgagcagggcatcaccatcagcgagaaaatcattcagctgttcgagttcagaatcccctactacgtgggccctctgaataccagcgtgggcaccaattcttggatggtccgaaagaaggatggccccatcagaccctggaacttcgatgagatcgtggacgagaaccagagcgccgagaagttcatcagacggatgaccaacaagtgtacctacctgatcggcaaggacgtgctgcctaagcacagcctgctgtactccgagttcatggtctggaacgagctgaacaacctgaagatcaagaacgagcccctgcctgtcgagacaaagatcaagctgttcaccgacctgttccagaaccagaaacaagtgacccctaagaagattctcgagttcctgaagtgcgagggctacagagtggaacagaaggacatctccggcatcgaccagcggtttaagagcagcctgggcagctacctggaaatgaagaagattttcggcgacgagatccggaagcagagcatgagagagatcgccgaggacctgatcctgtggatcacactgtatggcgaggcccctaagatgctcaagaagattatccggtctaagtacgagactaagcagatctccgataagcagatggaacgcatctgcaagctgaagtaccaaggctggggcagactgagcaaagagtttctggacggcctggaaggcaccagcacaaagacaggcgaggtgttcagcatcatcagcgccctgagaaacaccaacgacaacctgatgcagctgctgagcagcaattacaccttcgtcgaggaaatcgagaagctgaactacaagctgaccccagagctgaccaacttcagctacgaaaccatcatggccgacctggtggcctctcctgctattaagagagccgcttggcaggtcctgctgatcgccgaagaggtcaaaaagatcatgggccgccagcctaaaaagatcttcatcgagatggcccgagggcctaaagagaagaggcctaccgactccagacagaaaaaactgctgcagctgtacgccaagatcaaggatgagagcagagactggaagaaagaactcgaggaccggcaagagagcgagttccggtccattaagctgtacctgtactacacccagatgggcaagtgcatgtacagcggcgagcccatcgatctgagcagactggctgacacctccgtgtacgacagggaccacatctaccctcagagcaagaccaaggacgactccatcgataacctggtgctggtcaagcgggacatcaacctcaagaaaagcaaccacatgctgagccccgccattcaagagaagatgcaagagttctggcactacctcgaagatcagggcctgattagcaaagagaaataccggcggctgaccagaaagtcccctctgacagatgaagaactggccggcttcatcaaccggcagctggtggaaacaagacagagcagcaaagtggtggccgagctgtttcagagactgtacaacgacagcgacgtggtgtacgtgaaggccaaggccgtgtccgacttccggaacgagatcctgaaagtgaagaaatgtcggagcctgaacgactaccaccacgccaaggacgcctacctgaacatcgtcgtgggcaacgtgtaccacgagaagtttaccaacaatcccctccactggctgaaaaagcacccctccgagaaagagaagtacaacctcaaccagatgttcaaccacgacgtgatcaagaagcaagtcatctggaagtgcggcgagaagggctctctgaagatggttcgaaagcagctgaaactgagggacatccggtacaccagactggccacagagaacaagtgtggccagaacggcggcttctttgacagccagatcgtgtccaagaccgccaatgccagcgtgccaatcaagaaaggcatggacgtgaccaaatacggcgggtacaagacaatcacccctgcctactttgccctcgtgaccagcgaggataagaagggcaacatccagaaatccatcgaggccgtgcctctgtacctgaaagaggccattgagaaggatatcaacatctttatcgattactgcaaggacacctacaagctcaagaaccccagcatcctgctgccgaagatcaaaaaagacaccctgttcgtggtcaacggcttccccatgcacctgagaggcagatccaacaacaagctggtcctgcagtgtggcgtgcagctgtttctggaaagcaaatacgagatctatctgaagaatatcgagaagtacctgctgcggagccagtccttccacggcaaagaactgctgcccatcaccgagaacgacggcatcacctccatggaaaacctcgagatgtacgacgagctgtacagaaagcagcgggacacaatctaccagcacagacctgccagccagctggaaaccctgaaaaagggcagagatatcttcacccagctgccttgcgagaagcagtgctacgtgctgaacgagattatgaacctgatgaggtgcaagcctatcaccgccaatctgaaagagatccagggaagccctcacgccggcagcatcagcatcaacaaagtgatcaaccggtacttccagtgccagatcatctaccagagcgtgaccggcctgtttgagcaagaaatcgacctgctgagcctgtga

SEQ ID NO: 96 - DNA, 4512 bp, Artificial Sequence
  Synthetic sequence or sequence of unknown origin
atgagcaagaccatcctgggcctcgacctgggctctaattctatcggatgggccgtcgtgaaggccgaagtgtctgagtctggcgaggaaagactgacaggcatcgaagccgccggaagcagaatcctgcctatggatgccaagctgctgagcaagttcgagaagggcaacagcgtgtcccagaccgagacaagaagaaaggccagaagcgccagacggcggagcgagagaaaaaagctgagaagggccagactgctgcggaccctgagaatcattggatggctgcctgctcacatggccagcgccatcgacgactacggcaatatcaagagaggcagcgagcccaagatggaatgggacggcggcaacttcatgttcacccgggcctttgaagagatgtgcgccgagtttagcgccaggcatcctgagctgaagtccgtgtctcacgactggaccgtgtactacctgcggaagaaagccctgagagaggccctgacaggacaagaactggcttgggtgctgctgcacttcaaccagaaaaggggctacatgcccagccggaccgatgccaatattcctgccgccaaagagggcgagaagaaagaaatcgtggacgtccgcgtcgtgggctgtaaagccgctgaagccgctaagggcagaaaagccacaaaggccgtgacactgatcttcgacgacggcggcgagatgaacatgccctactacggcaccacacctgaggaaatggtcggacggcagatggaactgctgaaaaccacaaaagagggcaagacccctacctacacaaaccccggcgagaacgattggaccttcaagaaagagaagtccaaagagcggatcacaagcgcccacaagacagtgggcgagtacctgtacgacagcctgctggaagaacccgatgtgaagctggctggcggcaaagtgacagtgctggacagagagctgtacaagagcgagctggaagccatcctgaccaagcaggccgagttccacgatgagctgaaaagccctacactgctggccaagtgtgccgaggctctgtaccctaacaatcctggacaccgggccgagctgatgagacacacaatggccaacctgatcatgaacgacatcatcctgtaccagcggcctctgaagtccaagaagtccacaatcgccgactgtcccttcgagtaccggacctacatggacaagacaggcgtggaacaggtgcagaaactgaagtgcgcccctagatctcaccctctgttccaagagttccggctgtggcagttcgtgaccaacctgagagtgaccgacgagcagaccggcaatagcgaggacatcctgacagacgccgaccggatgaagctgttcgatgccctgacacctaagagcaaagtgaaagccgccgacgtgctgaagatcgtgcagaagatcatcaagcccgaggaatccaaaaaagagaagggcgctgcccctgagtgccactacagagtgaatatggtggaaggcaaggactacccctgctacgacatgagagccgagattgccgcctgcctgaccaacaagaagtctggacctggactgaaggccggcgacgcctatgagctgatcacccaaacaagagaagagggcgacatgaccaacgaggaatacctgtggcacatcagctacagcgtgacagaccccaaagagtttgagaaggccatcaagaagtgggccgagacaaacggactgcctgccgaagaaaccgccagagccttttgtgccctgaagcctaacaagaactacgccagctactccctgaaggccattaagcggctgctgccactgatgcggatgggcagacattggagcttcgaggccatcgatgccaagaccagagccaagatcgagcacttcatcaacggcgaagaggccgaggacatgacccctgagacaatgcacaagtgggcagccgacaaagaggatggcggctacgatctgaaacaggccgaagagagctttcagggcctgcagccttggaaggcctgtatggtggtgtatggcaagctgagcggagatgagggcctgaaatggcagacagccgatgacgtccgagagtggctggataagtttccccacggcagcctgcggaaccctatcgttgaacaggtggtgctggaaaccatgagagtggtggccgacgtgtgggataagcacggcagacctgatgagatccacatcgagatggcccgggaactgaaaaagaccaatgccgagcgggccgagatgaccagacagaatgcccagcgcgaagaggacaacgagagaatccggaagattctgagagagctggcctctacctgcgaggacgtgaagccttttagccccattcagcaggcccgcctgaagatctgtgttgagggtgctagactggtggcccctgccgaggaacctaagatcgaggaaatcgagaagtacaagctgtggatcaagcagaactacaagagcccctacaccggcgagtctattgagctggctagactgttcaccagcgactacgagattgagcacatcatccccagaagccggtactacgacgacagcttcaacaacaaagtgatctgcgaggccaaagtgaaccaggacaaggacaacaagatggccatggagtacatcaacgccgctcagggcaaagaagtggatctcggcggaggccggaaagtgaacattctgacacccgacgagtacgtcaagcggatcaacgacatctacaagaacaactcccggaagagagagaacctgctgagaaccgagctgccccaggacttcaacaatcggcagatgaacgactcccggtatatcgccgtgaaagtcaaagagctgctgaacaacgccgtgcgggctgaagttggagatgatggcgccggatctaagaacgtggtcgtgtgtacaggcaccgtgaccgacagactgaagcaggattggggcgtgaacgacaagtggaacgagatcattctgccccggtttatggccatgaacgagaaggtggccgataagagcgaccggaacaaccgctttatcgccaagagcaacggccatctgatccccaccgtgcctacagacatgctgaagggctttaacaagaagcggatcgaccaccggcatcacgccatggatgctatcgtgatcgcctgtgcctctagagccatggtgcagttcttcagcaaccagagcagcaacaaaggcggcaacatgttcgagaacctgagaaagtccctgtgccacaaggacgccaacaacgtgtgggtcgtgaatatgccctgggagacattccccaccgacgtgaagaatgccctggaatccatcaccgtgtccatcaagcaccggcagagaatcgtgacccggaccaccaatcactacacagtgaccaaaggcggacggcgggaagtgcgcaaacaggccacatacgccatccggaacagcctgcaccaagagacagtgtggggactcgtgaacctgcagcagaaagaacagatgagcctgaaggatgccatcaaagaactgcggaccttcctgagcgccagaatcgacgatcctcagatgaggcccaagagccagatcgtgtgcaagcccctgagaagaagaatcagccagctgattaccgccggcaagacagacaaagagattctggccctgctggacgccgagagcgacgtttggagcgaagagatcaagagcggcaaggtgtccgtgtacacatggtccaaagatggcggcacccggatctgcgccacaagatttctgagcagcctgagcgacctgttcagcaagctgaccgatgaggaaaagatcaagaacaagatcgccagcatcaccgataccggcatccagaagatcctgttcaatcatctggcccagtggcaaggcggagccgccacagcattttctccagacggcatcaagtggatgaatgagaacatccagacactgaatggcggcaagcctcacaagcccatctacaaagtgcggcggacagaaacctctgacgccaagcagcagatcggcaccaacggcaacagatccagcaaatacgtggaagctgccaagggcaccaacctgtttttcgccgtgtacgtggacgacaagggcaagagaaccttcagcacaacccctctgcggaccgtgatctctagacagctgcagggacagagccccgtgccagagacaatcggcgataatgagcggctgtgcttctatctgagccccaacgatctggtgtacgtgccaacacacggcgagcggtacatcgaggaccgcaacagaatctacaagttcgtgtcctgcttcgagaacagagcctggttcattcccgcctacgtggcaaaagtgatcgtggacaagtccgagttcggcagccagaacaaaatcgaagtgatcgacggcgtcagcatcaagaacgtgtgcctgcctgtggaagtggacagactgggcaacgtgaccctgaagaagatcggcgaggacgactga

SEQ ID NO: 97 - DNA, 4395 bp, Artificial Sequence
  Synthetic sequence or sequence of unknown origin
atgaagaagtactttctgggcctcgacgtgggcaccgagaatatcggatacgccctgaccaaggactacgaagtgatgcaagtgaacggcaagcggaccatgggcgtgctgagctttgaatctgccaacaccgccgtggacagacggacctatagagccaccagaagaaggctggaccggcggagatatagaatcgccctgctgcaagagctgttcaacgacgagatcatggccaacgacaagaacttcctgcggagactgggcgacaacgacctgtacctggtggacagaaacgtggaaggcaagtacagcctgttcaatgacaccgacttcaacgatatcgcctactacaagcagtaccccaccatctaccacctgagggaaaagctgatgatggaaggcaccgacgacatccggctgctgtatctggccatccaccacatcatcaagtaccggggacatttcctgctggccggcgaggtgtccacaaatgaagttggcggagtgaagcagctcgaggaactgatcaacaagctgaactccaagctggacgagaacaacgatgagaacaagaacaatgatacgacctgcttcttcgacaagttcgccaccaccgctctgagcgacgtgaaggatctgatctgtggcaccggcgatatcaccaagaacatgctgaaccagatcaccatcggcaagaagtacatcagcaagcgggacaagaagaacaagctcaacgagctgttcggcgtgtccagcagcaagaccagcaagaaaatcatcgacatcgtgatgggcggcaaagtgaacctgaccgagctgtttggcaaagagtactacgagaaagaggaagtcaagggcttcaccatggccgaggaatgggagagcattgaggacctgcagctgatcaaggacaacatcctgcacatcgacattatcgacaccatcaagcagatctacgactgggtcaccctgaacgagatgctgaagggcaagcagagcctgagcagcgccatggtggaaatctacgagacacacaagcaggacctccacgacctgaaagagttcatcaaggattacgcccctaacgactacgagagagtgttcggcgagatcaagaacgagaagggaaagatcgacaacagcatctgcaactacagctgctacatcggcggaggcagatacaacggcgacaagatcggcgccaatggcagatacggctccacatgcacccaagaggacttctacaagtttatcaaaaagatcatcgagagcgtgaccgtggaagaggccaccgcactgagagatgacctgctggaaagaatcgccaacaaggacttcatgcccaagatcgtgtccaagaacaacagcacaatcccctaccagctgaacatgatggaactggacggcatcctggacaaggccagacagaaccccaagttcaccttcctgaacgacgtggacaacggctggacaatcgccgataagatcaagagcctgctgtccttcagagtgccctactacgtgggccccgtgaaagagtacgaggacaacgacaacaacaagagatacgcctgggccgtgcggaaagagagcggaagaatcaccccttggaacttcgacgacaagattgacaagaagcagagcaacgagatcttcatcagacggatgaccaaccggtgcacctacctgaagctggccgacacactgcccaagaacagcatcctgttcagcaagttcatgtgcctgaatgagatcaacagcatgaagatcaatggcgacgccatctcctgcaaagagaagaaagccatcttcgataacgtgttctgcaagaagaatcccacaatcaagaacatcaagaagtatctgatcgagaacttcggctatgagaagggcatcgtgctgtccggcatcgacaacgagattaagtcctccatgaagacctacatcatctacaaaaacaagctgggcaacaaggtggacgctgaccccaacatgatcgagcggatcatcttcctgagcaccatccacgaggacagccagatgctggaaaagagcatccgggaagagttcggcgataagctgaccgaggacgaaatcaaggccatcaagggattcaagttcaatggctggggcagcctgagcgccgagtttctgaccggctataagaacaacggcatcaagctgatgttcgacggcgaaatgctggacatcatcgatattatgtacgagtacaacctgaatctgcagcagatcatctttaacgagaagtgcaacttcagcgaggccctggaagcctacaacctggaacacaacatcgtggaagatagcaacgtgtcctacaacaaggatatcgctgactacccttgcagccccagcgtgaagaaatgcgtgtggcagagcttcaagctcgtgaaggacattgtgaagcagacaaagatcgtgcccgacgtggtgttcatcgagtcctgccgggaaaacaacgactttaagaagaaccagcggacctccaagcggcgggatatgatcgtggccatctacgatgaggcccggaagaagattaacgagctgcagagagacaagaaggccgagttcagcatccaagagctggaaggcctgagcgaggacatcgactactgccagaaaaccctggacaactactccgacagcgagctgaagaaagagaacctctacctgtacttcatgcagctcggcaaggacatgtacaccggaaaggccatcgacctgaaccaggtcctgttcggcaatatgtacgaccacgatcacatcatccccaaggccgtgattaaggacgacagcttcaccaacctggtgctggtggccaagaaagaaaacgccgagaagctgcggacataccctctggaaagccagttcagacagaccacactgtggaagaagctgtataagatcggcctgctgagcaatgagaagtacagcagactgatccggcagacccctatcaccgacgaggaacaagagaagttcattaaccggcagctggtggaaaccagccagacagtggttctgctgcgggacctgctgaatagatacttcgccggcaagaatgtggaagtggtgctgtctaaggccggcaatgtgtccatgttcagaaaagagttcgacctcaccaagagccgggaagtgaatgacttccatcacgcctgggacgcctatctgaacatcatcgtgggcaacatcctcaacaaagagtttaaccacaactggttcatccggcaggataacggcaaggataagagctacaacttcctgagagtgctgcggaagcaggccacagccaacaacaacgaaatcctgaatatcatcgaaaagaccatgaacaacatcgacttccagatggtcaagctccccgaggaaaagaagggcaatttctacagcgaggtgctcaagacccacgagaacgacaaggacagctctctgatccccatgtgcgactctaagatcgtcggcggaaaagaaattcaccccaagtgcgacaccaccaaatacggcggctacaagaccgccaataccgcctactttatcctggccgactccatcgacaagaaaggcgccgtgcagcggaacattgtggccatcagcatcttcgacgatgcccggatcaagaatggcaagatcacctacaaagagatctttgagcgcatcggcctgaaggacggcaagctggctaatgtcgagggaatgaaggtgcccatcattaagaccggcagcctgctggatttcggcgcctattgtctgaggctggccggaatgaccggcaacagactgaccttccacaacgccaatcagctgtttgtgtccaaggaccagaaccggtacatcaaagaactgggaatcctggtcgacaaggtggtcaaagagtccaagaaggacaccaaagaggataagaaagaagctatggccctcgagatcattgaagagagcatcaggcggaagaacaaccccgacaacaagaactccaacatcattgtcgtgaaccggaaggacaacctcaagctgtacgacttcttcgtgtacaagctgtctcacaacccctacaaggacatccccacctactcttctctgctggatattctgcagcggggaaaagaggatttcgagcagaaagaaatctatgcccaggtgctgctcctgttcaacattatcaaggcctttcagtgcaacgcccaaaaagtggatgtgtctgccctgtcctacgtgaacaagaaggggatcgccacaaaaggcggcaccggacagtgctctatcgccatcaatagcgacatcaccgaaatcgacaagctgatcctgatcaaccagagcatgagcggactgaaagagcagagaatccagctcaacctgaaaaaggtggacaagtga

SEQ ID NO: 98 - DNA, 3447 bp, Artificial Sequence
  Synthetic sequence or sequence of unknown origin
atggccctgcggtacatcctgggcatcgatctgggcatctctagcatcggcacagccctgttcaagatcctgcctgacgccaccgacctgaacgacatccacagcttcgagaagatcctggatgccggcgtgcggatctgtcctgtttctgaaggcgccgctaaccggcggaacttcagatcccagagaaacgccaagaagcaccggaaggccagaaagaaggccctgattgccctgctgcaagagtacaagctgctgcccctggacagaagcgaactggaactgggactgagaagccagccttacgctctgagagccaaggccatgcaagagcccctgagcaatgcctacgagctgggctactgcatcatgaatatcgccaagctgagaggcgccggattcatcgacgaggccgaagagaacgaggacgagaagaagaagtccaagaccgccaacagataccagatcctcgagcaagaactcaagaccaagaatatcaccctgagcgagtttctggccgaccacctggccaagaacaattgcgtccggcagagactggactttatcgccgagaaggtgcccttcagcgtgcccagatacctggtcaagagagactactacgccctgatggaaaagcaggccaagcactttggcatcagcgacgcccaagtgaaggccatctacagcaccatcttccaggacttccccaaggctccctacgccaatgctccttgttctctgctgccagagacaggcagcagactgcccaaaatgcacagactggccgaggaactgcggatctaccagcagtgcaacaacatccggtacaacaccgtggaacacaccgacatctaccagggcctgaccagacagatgagagatgctctggccgagaagctgatgcaaggcgagggcctgaacaagaccagcatcaagaagattctgcagaccttctgcaaagagaagatcaagagcatcaactgctacgcccaggacgaggaaatcaccgccatcaagcctttcgctcacgtgaaggcctttgccggcattcccaccttttggaagctgccccagcagaagcaggacgagctgatcgagttcattgccgatcctctggacgtgaaagccaagagcgccaagcctgtgctgtacgacgaagagaagttcctccagatctgcatggaaaaactgcagctgagcggcctggaaggcgagcagaaactgtatgccgctctgaacctgctgcctaaggaccggacaatgctgggcaaagaggccagcaagcagatcctgcaaaagctggtggatggcatcgaggtggacggcgaatggaaggccccaacctactatgatgccgtgaccgcctgcaactttaccagagcctctgccgaacagaaagagtacgacttcctgccttactacggcgaggtgctggtcaacgatatcctgcctattcacccctggcacctggaaagaaccgccgaggaagagaaaatcggccggatcgccaatcctgtggtgcactccatgctgaaccagctgagaaaggtcgtgaacgagatcattgccctgtacggcaagcccgagatgatcaagctggaaatcgccagagacttcggcctgagcaagatcaagcgggacaagctcgaaaagcagcggcaggccaacgagaagtacaacagaaccatcgacgccgagctgctgagattcggctacgccagcacacccaagaaccggctgaagtacagactgtggaaagagcagaacggcaaggacatctactcccggcaagagtttaagatcgccgacttcaaccgctaccagatcgaccacatcatccctcaagaggctggcgggaccaacagcttctgtaacctggtgctgaccgacaagaacaacgtgaagggcaacaccttcgcctacgacttcatccaggccaagtttcccgactgctgggagtccatcaagaaagaaatggaagagatgcctaagcacaaggcctggcggttcacagccgaggccaaaacaagatacgctctgtacggcgacgagacagacgaggactatgccgatagaaggctgcaggatacccggtacatggccaaggctgccctgagatacctgagctgcatctgcaagaacatcctggccattagaggcggcatgacagcacagctgagacacctgtggggcttcgacggaatcgagtatgagctgatgggcctgaatgtgcccaaagagcggatcgacaccgagacaggcgaagtgtctgtggattctaacggcgacgccgctatcaaccccgattgggaagccaagcctagaatcgatcacagacaccacgccgtggatgccatggtcctgtgtgccattacacggtcactggcccagaagatgtacagagccgacaaccggaacaagaagatcgacgagtctatcgccgacatgcctttcagaaagagccccaagaatagcgagctgaagtccttccgcgagctggtgctggaaatgctgaaaaccatcaagatcagccacaagcctgagcacgacaccaacacacagctgcacaacgagacagccatcagaatcctggactacgacgagaaggaccagctgtacattgccaactacatgcggagcctgtccaacatcgatagcttcagcaaactggaaacaatcgccgtggccgaaaacctgggcacatctcctacagtgcggaagatgagggaaagatgcgcccacattatcaacgatgtgtctgcccagagattcgccgccgagaaaagcctgaagcagaagaacaccgataacgccgctcagggactgaaagaagtgaagatcaccgaccaggcactggtgcaagaggccattaggctggccaaagtgggcaacaagtaccccagactggaaaagttcaccctcgtgaacatccggaagaaacagcagtgtggctacgagcccgccagcaaccacagagtggatttcttcgtgtacaccgacggcaagaagaaggacgaaatcggctgggagtgtatcaagtccatcgatgccgccaatccaaacttcaagcccaagtggcaagagtatggcgaactcgtttggagcgtgtgcaagggcgacatcctggaactgcacttcgacaaagagacactgctgaaagaaaagatccccatggccttcgtgcggcagaacgagcagcaagaatactgcatgctggccaaggtgctgaagttcaccgccacctacatcgtgttcgtgtccgcctttgatgccagagccgatcagaagaacgccctgaaagagaaccccgagcctttcatgagatggaagtccggcaactgcggcctgtccttctattgcaaggccaaagccagaaaggtgctgctgagccccttcggcaaagtgaacaaaaagctgcagcggctgtggcacggaaagaaagtgtga

SEQ ID NO: 99 - DNA, 3447 bp, Artificial Sequence
  Synthetic sequence or sequence of unknown origin
atggccctgcggtacatcctgggcatcgatctgggcatctctagcatcggcacagccctgtttaagatcctgcctggcgccaccgacctgaacgatatccacagcttcgagaagatcctggatgccggcgtgcggatctgttctgtgactgaaggcgccgtgaacagaagaatcctgcggagccagagaaacgccaagaagcaccggaaggccagaaagaaggccctgattgccctgctgcaagagtacaagctgctgcccctggacagaagcgaactggaactgggactgagaagccagccttacgctctgagagccaaggccatgcaagagcccttcgacaatcctttcgagctgggcttctgcatcatgaatatcgccaagctgagaggcgccggattcatcgacgaggccgaagagaacgaggacgagaagaagaagtccaagaccgccaacagataccagttcctcgagcaagaactcaagaccaagaatatcaccctgagcgagtttctggccgaccacctggccaagaacaactgcatccggcagagactggactttatcgccgagaaggtgcccttcagcgtgcccagatacctggtcaagagagactactacgccctgatggaaaagcaggccaagcactttggcatcagcgacgcccaagtgaaggccatctacaccaccatcttccaggacttccccaaggctccctacgccaatgctccttgttctctgctgccagagacaggcagcagactgcccaaaatgcacagactggccgaagaactgcggatctaccagcagtgcaacaacatccggtacaacaccgtggaacacaccgacatctaccagggcctgaccagacagatgagagatgctctggccgagaagctgatgcaaggcgagggcctgaacaagaccagcatcaagaagattctgcagaccttctgcaaagagaagatcaagagcatcaactgctacgcccaggacgaggaaatcaccgccatcaagcctttcgctcacgtgaaggcctttgccggcattcccaccttttggaagctgccccagcagaagcaggacgagctgatcgagttcattgccgatcctctggacgtgaaagccaagagcgccaagcctgtgctgtacgacgaagagaagttcctccagatctgcatggaaaaactgcggctgtctggcctggaaggcgagcagaaactgtacgccgctctgaacctgctgcctaaggatcggactatgctgggcaaagccgcctctaaggccatcctggccaaactgattgagggcgccgaaatcgatggcgtgtggaaggccccaacataccatgatgccgtgaccgcctgtaacttcgtgcgggccgatgaggaccagaaagagtacgacttcctgccttactacggcgaggtgctggtcaacgacatcctgccaattcacccctggcacctggaaagaaccgccgaggaagagaaaatcggccggatcgccaatcctgtggtgcactccatgctgaaccagctgagaaaggtcgtgaacgagatcattgccctgtacggcaagcccgagatgatcaagctggaaatcgccagagacttcggcctgagcaagatcaagcgggacaagctcgagaagcagaggaaagccaacgagaaaaacaaccgggacatcgatgagaagctgctcggctttggctacgcccctaccaagaagaacagactgaagtaccggctgtggaaagagcagaacggcaaggacatctacagccggcaagagttcgaggtgtccgacttcagcaagtaccagatcgaccacatcatccctcaagaggctggcggcaccaacagcatctgtaacctggtgctgaccgacaagaacaatgtgaagggcaacatcttcgcctacgacttcatccaagagaaattccccgaccagtgggagtccatcaagaaagaaatggaagagatgcctaagaacaaggcctggcggttcacagccgaggccaagacaagatatgccctgtatggcgacgagacagacgaggactatgccgacagacgactgcaggatacccggtacatgagcaaggctgccctgagatacctgagctgcatctgcaagaacattctggccatcagaggcggcatgacagcccaactgagacacctgtggggcttcgatggcatcgagtatgagctgatgggcctgaatgtgcccaaagagagaatcgaccctaagaccaagctggccttcaaggacagcaacggcgacgtggtcatcaaccccgattgggaagccaagcctcggatcgatcacagacatcacgccgtggatgccatggtgctgtgcgccattacaagatcactggcccagaagatgtacagagccgacaaccggaacaagaagatcgacgagtctatcgccgacatgcctttcagaaagagccccaagaacagcgagctgaagtccttcagagaactggtgctggaaatgctgaaaaccatcaagatcagccacaagcctgagcacgacaccaacacacagctgcacaacgagacagccatcagaatcctggactacgacgagaaggaccagctgtacattgccaactacatgcggagcctgtccaacatcgacagcttcagcaaactggaaacaatcgccgtggccgaaaacctgggcacatctcctacagtgcggaagatgagggaaagatgcgcccacattatcaacgatgtgtctgcccagagattcgccgccgagaaaagcctgaagcagaagaacaccgataacgccgctcagggactgaaagaagtgaagatcaccgaccaggctctggtgcaagaggccattagactggccaaagtgggcaacaagtaccccagactggaaaagttcaccctcgtgaacatccggaagaaacagcagtgtggctacgagcccgccagcaaccacagagtggatttcttcgtgtacaccgacggcaagaagaaggacgaaatcggctgggagtgtatcaagtccatcgacgccgccaatccaaacttcaagcccaagtggcaagagtatggcgaactcgtttggagcgtgtgcaagggcgatatcctggaactgcacttcgacaaagagacactgctgaaagaaaagatccccatggcctttgtgcggcagaacgagcagcaagaatactgcatgctggccaaggtgctgaagttcaccggcacctacatcgtgttcgtgtccgccttcgatgccagagccgatcagaagaacgccctgaaagagaaccccgagcctttcatgagatggaagtccggcaactgtggcctgagcttctactgcaaggccaaagccagaaaggtgctgctgagccccttcggcaaagtgaacaagaaactgcagcggctgtggcacggaaagaaagtgtga

SEQ ID NO: 100 - DNA, 4272 bp, Artificial Sequence
  Synthetic sequence or sequence of unknown origin
atgaacaagatcctgggcatcgatctcggcacaggcagcatcggagtgtccctgagaaatcccaatctgggcagcagcctgttcgagcagctggaatacttcagcagcgacatctttcagagcggcgtgggcaaagacaagagcggcgaatattctctggccgccgagagactgagccacagacagtctagaaggctgaaggcctctagacggcggagactgtgggctacactggaactgctgatcgagtacggcctgtgtcctctggacagcctgctgctgaaagactggaaaacctacgacaagagcaaggccctgttcagaagctaccccaacagcgacaaggccttctcctcctggatcatgatggacttcgactgcgacggcatccccgactactctagcccttaccagctgagaagagaactggccaccgtgcagctggatttcgccaaggccgagaacaagagaaagctgggcagagccctgtaccacattgcccagagaagaggcttcaagagcagcaagggcgagacaatgagcgcccaagagaacgacagcaaagagagcttcgacctgtccgacaaggatatcgccctggaaatgcagaagtccgagagcaagctgagccaggacctgaagcagtatatggccgagcaccagtgtcacaccgtgggcgaagctttcgcctgtctggaagatgagggcatcagagtgcggaacagcagatatgccgccgtgcggacacagtacgaggacgagatccggttcatcttcgacttccaaaacggcctgagcctggacagcgacctgttcaagagactgatcagcaagaaaaaaggcgtggggaccatcttctacagaaagcccctgcggagccagaaatggctcgtgggaaagtgcaccctggaaacaaacaagacacggtgccccatctctcaccccgagtacgagaagttcagagccttctgcctgctgaacaacatcaagatccggaccgactacctgagcgactggcaccctctgaccgtggaaactaagagactgctgttcgaccagatcttcaccaagagagtgaaggccgactttccgttcaaggacatcagagagaagctgcagatcctgctgcaccagagattcgacggcgactgcaccaaagagcggagaaccatcaactacaaggacaaggtgtccattgccggctgtcccgtgatcgccagacttagaaatctgctgggcgacgagtgggagcagtttcacgctatgggccagaagcagagaaccagccactctaagcaccacatcggcaagcactgcgtggaatactccgcctacgacatctggcacatctgctacgagacagacgaccctgagtacctgaccgagtttgccctgcagaagctgaactgggacgaagatcaggccaagaaactcgtgcggctgtggtctacacaggcccagggatatgccatgctgagcctgaaggccattaccaacatcaaccggtttctggaaatggggctgatctacagcgacgccgtgctgctggccaagattcccgatatcatccccatgaccaacgacgacatcaagaacctggtcaacgtgtacaccgacaccatcaaggacagcatcacccaagaaaagacctgcaacaccatcgtgaacagcctgatcgccaattacaaggccatggacgtgacccaccagttcgccttccacaacaccagctacaccctggacgaggccgatcggagagaggtggaaagacagatcgtggaaaccatcggcatcaagacatggggcctgatggacgtggacgagcagagacagatctacgacaccgtggaacggaagtaccaagagttctttagcagcacccagcgggactacttcaagctgcctaaactgagcgacgccctgatcgaatacctgacaggcaagtaccctaacatccctctgcggcagtggaagaagctgtatcaccctagccagatcagcctgtacaacgtggacaaagtgaccgacagcggcagcgaagtgctgagactgggatctccttctatcggcgccatgagaaaccccgtggccagaaagaccctgaacatcctgcggcggaagatcaacgccatgctggatgccggactgatcgatgtggacgacacccggatcgtggtggaaacaaccagacagttcaacgactccaacatgagatgggccatcgagacataccagcgcgagagagagaacgagaatcaagaaatccggaagctgctggaagaactgctgcccgacagaaagatgagcgagagcgatatcacagccgccagaatcgcctttgaacagcaaggcgtggacaagtacaaagaaaagggcagagtgttcggcatcgacgtgtccaagtaccggctgtggaaagaacaaggcggcatctgcatgtacaccggcaagctgatctccatcagcaacctgtttaaagagggctgctttgacgtcgagcacacaatccccagaagcctgagcttcgatagctccgacatgaacctgaccatgtgcgacacctactacaaccggtccatcaagcagaacagaatccccaccgagctgcccaactttgagcacgatgctgtgatcaatggcgtgctgtacaccgccatcaagcccagactggaagcctgggagaacagagtggaacggctgcgggacaacgtgaacttttggaaggcccagagcagaaaggccttcgagaagtcccggaaggactactgcatccggcagagacacctgtgggagatggaactgaactactggcagggaaaagtgtcccggttcaccatgaccgaagtgacagacggcttccggaacagccagctggtggataccggcatcatcaccaaatacgccacactgtacctgaagtccctgttccacaacgtcgaggtgcagaagggaagcgccaccgccgagtttagaaagatgctgggaatccaggctatggacgagaagaagaatcggagcatccacagccaccacgccatcgatgctaccgtgctgacactgattcccgtggccgccaagaggcagaagatgctgaagctgtactacgagatcgaggaactgaaagagctgggcctgaactccgacgacaagaaagctatgctgcggcacgagattgaagagtgcgagttcgagaaggatgtgtctctgatccccagctacattgaggaacacatcgtggccaagcaccactccgaggacagaaccttcgaccacagcaagcgcagacccgacaagaacaatcatgtggctggcggcgatagtgtgcggggcagactgcacaaggatacctactacggcgccattaagctgccccaagagatcggcaccggcatcgatagaatgcccatggtcaaggacggcaagttcgtgtaccccgccaacgatgccatcaccatggtcatgaacgtggaaatcaccagcttcaccagcgagaaggactttagcatcatcatcgaccccagagtccggatgtctatcgccaaagccgtggaaaagagactcggcgagggcctgtctttcaaagaggccatcaaccagcctttctggatgctgaacgatgacggcatcgagatcaaagaggacaagaacggcaagcctatcagccctatccggcacgtgcggtgcaaagtgaaagccggcagaggctttatgaccgccgagaaggcactggaaatccggcagcacaacttcgtgtccaccaagagcaatgtgaacgtgcccaacaaggactacaagcggaaggtgtacgcccagaacgacaccaactacctgtacctgctgtacgagggcattaagaaaggcaaggtggaccggaagtccagaatcgtgaatctgtgggaagccacactgctgaagaagaactactcccaccagaccatcgataccatcatccgggaaaccagcgactacaaccacatcaccgagaagaatgtggaataccggctgagcgccatcattagagtgggcgactatgtgctgctgtggaaggacagccctgatgagctgagaggaatggatgtggcccacctgagcacccggctgtacaatgtggtcaagttcaacaccaccagctccgaccggatcttcctgaaaggacacctgtccgccaccatcgatcctgatctgtccctggtgtccaacgacttcaattgcctgatcgagcacagagacttcgagatcgacaccctgggcttcatcaccttcaaggactga

SEQ ID NO: 101 - DNA, 4542 bp, Artificial Sequence
  Synthetic sequence or sequence of unknown origin
atggaagataagcggaacatcctgggcctcgacctgggcacaaatagcatcggatggtgcgtgatcagcgagagcaatgcctgcagcgagacagagcaagtgcggaagattgaggacgccggctgcagaatcattcccatggatgccgccatgcagagcgacttcgccaagggcaataccatcagccagaccgccgatagaaccagcagcagaggctctcggagactgagagaacggtccctgctgagaagatgcagactgctgagagtgctgaacgtgatggaatttctgcccagccactacgccgccagcctgaccagatacggcagattcagaaaccacgaggaatgcaagctggcctgggctgttggagaagccggcagaccttacttcctgttcaagcagagctacgacgagatgctgcagctgttctggcagctgcaccccgatctgcagtctaatggcctgaaggtgccctacgactggaccctgtactacctgagacacaaggccctgagccagcctatcacacctcaagaactggcctggctgctgctgagcttcaaccagaagagaggctactaccaggccagaggcgaggaagagagggacgacagatccaagaaagaagagtactacaagctgaaggtggtggacgtggtggatacccacaccaagaagggcaaagccacttggtacgacgtgatcctggaaaacggcatggtgtaccacagagccgccgatgtggctcctgattggatcggcaagaccaaagagttcatcgtcaccaccgctctggaagccgatggccagcctaagctggataaggacggacagcccaagcggagctttagaatgcctggcgacgatgactggggcctgctgaagattaagacccaggccgatatccggaccagcggaaagacagtgggcgcctacatcttcaacgccctgctggccaatcctaagcagaaagtgcggggaaagctcgtgcggaccatcgagagagatttctaccgggacgagatcgtgaaaatcctggaagcccagaaacggttcatgccccagctgaccgatcctgctctgtacctggattgcatcaccgagctgtaccccagcaatgaggcctacagagccagcatctcccagcgggatttcacctacctgctggtggacgacatcctgttctaccagcggcctctgaagtccaagaagtccctgatcgccgagtgtccctacgagagccatgtgtttgtgggccctgatggacagccccagcagagatttgtgaagtgtatcgccaagtctcacccgctgtaccaagagttcagactgtgggagttcctgagccacctgagaatctacaagagcgaggtggacgccagcggcagactgatggacgattgtgacgtgaccgctcagttcctgcctgacgatgatgcctacgtggccctgttcaactacctgaacgacctgcctagcatcaagcagaaggacctgctgggcaagtacttcaagatcaagaagcccaagggcaccgacgccgagctgccctacagatggaattacgtgcaggacaaagagtacccctgcaacgaaaccaggggcgagatcctgatgagactgaagaaagccggcgtggacgcctcctttctgacccctcatgaagaggaacggctgtggcacatcctgtacagcgtgtccgaccggaaagagctgagaaaggccctgcagagatacgccgattctcacgccctgggccaagagtttgtggaagtgatggctaagcaccctccttacgccagcgattacggcgcctattctgccaaggccatcaagaaactgctgcccctgatgcggagaggcagctattggagaaccgaccacatcgaccctgccacactcgtcagaatccagagaatcatcgacggcgaagtggatgacaccatctctgagagagtgcggctgaaggccatgagcctgacaagcctggaacactacagaggcctgcctcagtggctggcctgttacatcgtgtacggcagacactctgaggccagagatgcccagagatggacacaccccgacgacatcgatagatacctggccagcttccggcagttcagcctgagaaatcctgtggtggaacaggtggtcaccgagacactgagagtcgtgcgggacatttggagagtgcacggccacctggatgagatccacatcgagatcggcagggacctgaagaaccccgccgacaagagaaagcagatggcccagaaagccgtggacaacgagaacaccaacctgcggattaaggctctgctggccgagtttctgaaccccgagttcggcattcaagaagtgcggccttacagccctagccagcaagaaaccctgagagtgtatgaggatgtggtgctgcactccgtggacgctatccccgacgatattgccgacatcatgaaggccctgtctcaggccgatgccgtgaagaggccatctcacaaacaggtgcagacctacctggactggctgcaggataactacgtgtccccttataccggccagacaatccctctggccaggctgttcaccagagactacgagatcgagcacatcatccctcagagccggtacttcgacgacagcctgagcaacaaagtgatctgcgaggccgccgtgaacaaactgaaggacaatgccctgggctacgagttcatcaaaaagcaccacggcgaggtggtcgaagtgggcgagaatagaagagtgaccatctacgaggtcgacgcctactgcgatcacgtgcagcaggcctacaagcacaaccgggccaagatgaagaaactcctgatggatgacatcccggacgacttcatcgagcggcagctgaacgacagccggtacatcagcaagttcgtgaagaacctgctgagccacattgtgcgggaagagaacgagcaagagacaaccagcaagcacctggtcgtgtgtcctggcagcgtgacagacaggctgaagcgcgaatggggagtgaacgacgtgtggaacagcatcatcctgcctagattcgagcggatgaaccagatcaccggcaccacacactttaccaccgtgtctagcagcggccacaccattccagacatgcccctgcatctgcagaagggcttcagcaagaagcggatcgatcacagacatcacgccatggacgccatcgtgatcgcctgtaccaccagagaacatgtgaatctgctgagcaacgaggccgctctgagcaggaccaacgccaatagataccagctgtctcggaagctgcggagatacgaggacaccctgatcatgagaaacggcgaggccagaaaggtgtccgtggccaaagaatttaacatgccctggccaaccttcaagagcgacctgcatcaggccctggaacaagtgatcgtgtcctttaagcagaacctgcgcatcatcggaaagaccagcaactacacctccagattcgtggacggcgtgaagaagatggtcaagcagaccaaaggcgacgaccattgggccatcagaaagagcatgcacaaggacaccgtgttcggcgagatcaacctgagaggcatcaagaccgctacactggccgatgcaatgcagaggcccgagagaatcgtgtctaccagcctgaaagccaaagtccgcgagctgctgtctctgggctatacaccagctcaggccaagagatacttcgatgaccacaacgacgagtggcccgagctgaacaccagaaagatcgaggtgtactacttcagctgcgagacaagcacccacgtgtacgccacaagaaagcccctggacacaagcttcaccgaagccgccattaagggaaaagtggccgataccggcatccagcagatcctgcttagacatctggctgcctgtcagggcgaccccgagaaagcttttagccccgatggcatcgacgccatgaaccagcacatcagatctctgaacggcggcaggttccaccagccaatcttcaaagtccgggtgtacgagagagccgagaagtttgctgtgggcaccgtgggcaacaagaagcacaagtttgttgaggccgccaaggggaccaacctgttctttgccgtgaccgaggaagaaacactgaacaagaccaccggcctgcctgaaaagacccggcggtttagaaccattcctctggccgaagccatccagaagatgaaggctggacagcctctggacgcccaggctaccttcattctgagccccaacgatctggtgtacgtgcccaccgaacaagagctggccgacggatgtatcgcctctccactgaataccagccggatctacaaaatggtgtctgccagcggcgtggaatgctgcttcgtgcctttttgcgtggcctctcctatcgtggacaaggtggaattttcccggcacaacaagatggaacgggccgtgacaggcgagatgatcaagagagtgtgcatccctctgaccgtggaccggctgggaagaatcatcaagatcggcgtgtga

SEQ ID NO: 102 - DNA, 4152 bp, Artificial Sequence
  Synthetic sequence or sequence of unknown origin
atggaaaagcagaactactacatcggcctggacatgggcacaagctctgttggatgggccgtgaccgacgacagctaccacatcatcagacggaagggcaaagacatgtggggcatcagagagttcgaggaagccaagaccagcgccgagagaagaagccacagaatcagcagaagaaggctgcagcggagcaaagtgcggatcggcctgatcaagatgtacttcgacgaagagatccggaaggtggacccattcttctacgagcggctggacaacagcaagtactaccaagaggacaaggacgagatcgtgaagtcccctaacggcgtgttcaacgacaaagagtacaccgacaaggactactacaatcagtaccccaccatcttccacctccggaaagagctgatcaacaacgagaacgccccttacgacgtgcgcatcgtgtatctggccgtgctgaacctgttcaagcggagaggccacttcctgaacagcagcctgagactggatgacgagagcgccgagtttagcctgaaggacgcctacagcaacctgctgaccatcatggccgacaacctgcctgaggaactgtctatcgcctttcctgagatcgacagcgacaacacctacctggaactgcagaacatcctgggaacccgcgagttcggcagaaagcagaaaggcgagaaggtggccaagctgctgggcatcgaccgcaagcagaaaaaagagatggaaatcgtcaacggcatggtcggactgagcatcgactgctgcaagctgttcgacatcgaggccgatagcaagatcaccgccaagttcagcgatttcggctacgccgagaaagagcccgagatcctggatcagctgggcgacaattacggcagcatcctgatggccattaagaccgtgtacgacatcggcagcctgaccgagattctgaagggccagaagtacctgagcttcgccagagtggaagattacgagcagcacaaggccgacctgcggaagctgaagaaagtggtcaagaagtacgccctcgagcgctacgactacttcttcagacagaaagaggacggcacctacagcgcctacgtgaactccgtgaacagcgagaagtacaacgacctgggcagcaaggacaccaagcctaacagacggaacatgaaggcccggtccagggacgatttctacaagggcgtgaagaaactgctgaagggcatgccagaggacgacgccgatgtgatcgagatcaacaagaagatcgagaacgagacattcatgcctaagcagctgaccgccggcaacggcatcattcctaatcagctgcacgccatggaactgaagaagattctggacaacgccagcggctacctggatttcctgaacgatgtggatgagagcggctttgccgtgaaagagagaatcctgcggctgtacaccttcacattcccttactacgtgggccccatcagcagcggctctaagacaggatgggccatcagaaagcctggcttcgagaaaggcgtgatcctgccttgggaactcgacgagaagattgaccggaccgagacagccaagcggttcatcgacagaatggtccgacggtgtacctacctgaacgacgagatggtgctgcccaagtccagcctgaagtacgagcggtactgcgtgctgaatgagattaacaacatccggatcgacaatacccggatcgataacgacctgaagaagcggctgtttaacgagatctacctcaacggcaagaagcctggccggaagaaaatcgagagcttcctgtacagaaacggcgtgcccagagatgcccaagtgaccggcatcgacaaagaactgaacaacgccctgtccagctacggcaagttcaaagagatcttcggcgacgagctggaaaaggacagcgtgaaaaaaatggtggacgacatcatctttcactgcacagtgtacggcgacagcaagaagttcatctacgattacatccagaagaactaccccgagagcgagtaccctctgctgaacaagaaaaccatcaagcgcatcatcggcttcaagttcaaggactggggcagattcagcgaggaaatgctggacctgcagggctgcaattacgagacaggcgaggtgtactccatcctgacagccctgtgggagacaaacaacaacttcatggaactcatcaacagcgacagcttcgagtacaagaagctcctggaagagaagtccggcagcgccatttctagcctggctgaagtgacacccgagctgctggacgagtactactttagcgcccctgtgaagaaaatgatcctgcagaccatgggcgtgatcaaagaaatcgtgcagatcatgaagtgcgagcccgaccggatcttcatcgagatgaccagatccgacggcgaaaagggcgacaagggcagaaaggactccagaaagaaggccctgctggatctgtacaagaacatcattgacgagctgcacgacaagaattactggaaggacctgatcgagaatgccgataaggacggccggctgcggagcaagagaatgtacctgtacatcaagcagatgggcatggacatgtacaccggcgagcccatcgatctggactacctgttcgatgagaaccgctacgatatcgaccacatctaccccagacacttcgtgaaggacgacaacatcgagaacaacctggtgctggtcaacaaggccagcaacgccaaaaagaccgacatctatcccatacctggcttcatcaaggacaaccccaaagtgtggaagctctgggagatgctgcacaagcggggactgatcaacgacgtgaagtacagcagactgcgcaacagcgagcccttcacagatgagcagaaggccggctttatcgccagacagctggtggaaacaagccagggaacaaagggcgtgtccgacatcctgaaacaggtgctgcctcagaccaagctggtgtatagcaaggccggcaatgtgtcccggttccgctccgacaacaagttctacaagagccggctgatcaatgactaccaccacgccaacgacgcctatctgaacatcgtcgtgggcaacgtgtactacaccaagttcaccagctctcccatgaatttcatcaagaacgagtacagcaaggattccaagaagtttgagtacaacctggacaagatgttcgcctggaaggtcgagagagatggctacaccgcctggattcctctgaaaaagggcaacgagtatatcgccaccatcaagaccgtcgagaagatgctggccaagaacaccccactgctgacccggcagtctttcgtgaaaagcggagtgattaacaaagtgaccctgtacggcaaaaacaccgccacacacgagacttacatccctctgaagatgagcgaccccaagatgcaggacgtgaccaaatacggcggctacacctccgtgaatatctgctactttttcctggtggaacacgagaagaagggcaagaaagtccggacaattgaggccctgcctggctatctggaaaagaaggtggaaaacgaccccgccgaactggaaagatactgtgtggaaggcctgggcctcgagagcccttctgtgcggtacagaaagatcagaatccagagcctgctgaaagtggacggctactacatgcacctgtccggcaagagcggcaatagcctgatcgtgcggaatgcctgtgctctgagcattggcaagaagtggcaggactacatccactacatcgaaaagagcgaagagaacggctttaagtacgacgactcccggatcaccaaagagaacaatatcgagctgtacgatatcatctccgagaagcacatcgacggcgtgtacaaaaagaggccttgcggcatcggcgacgccgtgaagaacggaaagaagaagtttaaagagcttaccaaagaaaatcagtgcaaagtgatcctccagattctgcagatcagcagcatcggcaactataaggccgatctgtctctgatcggcggagccagcatgatgggcaacatgcggatctctaaagagatcacaaagaacgagaaagtgatgctgatccaccagagcgtgaccggcctgttcgaggacaaactggtggacctgaagtccatctga

SEQ ID NO: 103 - DNA, 4623 bp, Artificial Sequence
  Synthetic sequence or sequence of unknown origin
atgaagcacatcctgggcctcgacctgggcacaaattctatcggctgggccatcgtgaacgccgagcagatcgttagagaggacgagacaaactacctgaagcctgtgtctatcagcagcgccggcagcagaatcatccccatgtctgccgatatcctgggcgacttcgacaagggcaatagcatcagccagaccgccgagcggacaagactgagaatggccagacggctgagagagcggaacctgctgagaagagaacggatgctgcggaccctgaagctgatgggctttctgcctagccacttcgccaaagagatcgacatcttcggcaagctgttcagcaacaaagagcccaagctggcctggaagaagaacgaggaaggcaagaacctgttcatcttccaagacagcttcaacgagatgctcgaggacttcgcctgtcaccagcctcagttggtggccgagggcagaaaggtgccatacgactggaccatctactacctgcggaagaaggccctgacacagcggatcacaaaagaggaactggcttggattctgctccagttcaaccagaagcggggctactatcagctgagaggcgaggacgaggaagatgacaacaccaagagagtggaatatctggccctgaaggtggaaagagtggaagccacagacgagaagaggggcgacgaagtgtggtacaacgtgtacctggaaaacgacatggtgtaccggcggaccagcagataccctctggattgggtcggaaaagtgaaagagttcatcgtcaccaccgatctggaaaaggacggcagccccaagaaggacaaagagggcaacatcaagcggagcttcagagcccctaaagaggacgattggaccctgctgaagaaaaagaccgagaacgacatcgagaacagccagaaaaccatcggctgctacatctacgacacactgctgcagaagcccaatcagaagatcatcggaaagctcgtgcggaccgtggaacggaagtactacaaggacgagctgctgcgcatcctgcggagacagcaagagctgattcctgagctgcaggacaccgagctgtacaagaagtgcatcgaggaactgtaccccaacaacgagggccacagaagcaacctggccaagagcgacttcgtgaatctgttcgtgaatgacatcctgttctaccagcggcctctgaagtccaagaagtcccagatcgagaactgcccctacgagttccacaagggcatcgacggcaacctgtatcctgtgaagtgtatcgcccagagcaaccctctgttccaagagttccggctgtggcagtttatccagaacctgcggatctaccagagagagagaatcatcaccgacggacagctggccctgtttggctctacacacacaggcaagctgcagaccgatgtggacgtgacagccgagttcctgaagtctgaagaggattacgtgaagctgtttgactggctgaacaaccggaacgccatcaagcaggatactctgctcaacagcttcttcaagatcaagaaagagcgcggcaaggacaagtacccctaccggtggaactacgtcgaggacaaagaataccggtgcaacgagacaagagccgccatgctgacaggcctggaaaagtccggcatcagaaccgatgtgctgacccacgagatggaaatggccctgtggcacattctgtacagcgtggaagataagacagagatcggcaaggccctcaagaccttcgccaagaagaacaacctgggcgagatgttcgccgacgtgttctgcaagatgaagccctataagaaagagtaccggtcctacagcgagaaggccatcagaaagtttctgcccctgatgcggatgggcaagtactggaacaaagagaacatcgacgacaagaccctgagccggatcgagaagattatcaccggcgagtacgataagaccatcaagaaccgcgtgcgggaaaaagccatcaacctgaccgacatcgaccacttcaagggcctgccagtgtggctggcctgttacatcgtgtacaacagacacagcgaggcccgggaaatcgagaagtgggacaagcccgaggacatcgacagatacctgaactccttcaagcagcacagcctgcggaaccccatcgtggaacaagtgatcaccgagacactgagaaccgtgcgggacatctggaagcaagagggcgatatcgacgagatccacgtcgagctgggcagagagatgaagaaccccgccgacaagagaaggctgatgaccgagagaatccagcagaacgagaacaccaacctgagaatcaaggccctgctgatggaatttctgaaccccgagctgggaatcgagaacgtgcggcctcattctcccagccagcaggacatcctgaggatctacgaggaaaacgccctggacaatctgaccaaagaggatgccgagtacgagttcgtgaccaagatcagcaagatggctcagcccagcaagtccgacatcatccggtacaagtgttggctggaacagaagtatcggagcccctataccggcaagatgatccctctgagcaaactgttcacccctgcctacgagatcgagcacatcatccctcagagccggtacttcgacgacagcttctccaacaaagtgatctgcgaggccgaagtgaacaagctgaaggacagactgctgggctacgagtttatcaaagagcacgccggcgagatcgtgcagctgtctcaaggcgataccgtgaagatcctgtccgtggaagagtacgagaagttcgtgaaggactactacggcagcaaccggaccaaaatgaagaaactgctcatggacgacatccccgacggcttcatcgagaggcagctgaacgacagccggtacatctctaaagtgatcaagaccctcctgagcaacatcgtcagagagaagctcgagaacggcgagtatgagcaagaggccgtgtccagaaacctgatcagctgcaacggcagcatcaccgatcggctgaaaaaggactggggcatgaacgacgtgtggaaccacatcattctgccccggttccagagactgaatgagctgaccggcaccaatctgttcaccacacagaaccacgagggacacgagatccctgccatgcctttcgagctgcagaaaggcttcaacaagaagagaatcgaccacagacaccacgccatggacgccattgtgattgcctgtgccaccagggatcatgtgaatctgctgaacaatgaggctgcccacagcaagcacaacgccaacagataccagctgcagcggaagctgcggagatttgccaagatcaccatcgacggaaaagagagggaaatcgcccaagagtttctgaagccctggcctacctttaccagcgacgccctgagaaccatccagagcatcatcgtgtcctttaagcagaacctccgcgtgatcaacaagaccaccaacagctacctgcactacgacgagtacggcaagaagatctaccacaagcagacccagggcgagtcctgggccattagaaagagcatgcacaaggacaccgtgttcggcgaagtgaatctgagaaagaagaagtctgtctccatcaaagaggccatcgtcaagcctgaggctatcgtgaacaaagagttcaaagagaaagtcaaagagctgatcgcccagggccacgacgccaagtacatcaagaaatatgtcgaggataacaaggacatttggagcgacatcaaccccagcaagatcgacgtgtactactacacccgggatgagaagaagcagaacggggagcccaaagagagatacttcgccaccagaaagcctctggacaccagcttcgaccagaagaagatcaaagagtctatcaccgacaccggcatccagaaaattctgctggcccacctggaaagcaagggcaacgatcctgagcaggccttctctcccgatggcatcgatgagatgaaccggaacatcgtgaccctgaacaaggataagttccaccagcctatcatcaaagtgcgggtgtacgagaaagccgacaagttctgtatcggccagaagggcaacaagaaaaaaaagttcgtggaagccgccgacgggaccaacctgttctttgctgtgtatgagactgccgacaaaaagcgggtgttcgccacaatcagcctgggcctgagcatcgattgtcagaaagagggctctcagtactggatcaagctgctggacgagcggctgagggataagacccctacagaagaactgcagccctaccagaagatggacatccccacagacgcccatctgctgttcattctgagccccaacgatctggtgtacgtgccctacgatggcaagcctaccgatctgacccaggtggaccgggacagaatctacagagccgtgtccttcaacaaaaagcagtgcttctgcatcaagtgcaacgtggccacacctattgtgaacaaggtcgagtacaccaccagcaacaagatggaaagagccaccacaggcgagatgatcaaagaagtgtgcgtccccatcaaggtggacaggctgggcaatatcaccaagatcggatga

SEQ ID NO: 104 - DNA, 4137 bp, Artificial Sequence
  Synthetic sequence or sequence of unknown origin
atgaagcggatcatcggcctggatctgggcgtgtcatcttgtggctgggcctatgtgaaagaggccgagaacgaggacgagaagtccgagatcctgagaatcggcgtcagagtgaaccctctgaccgtggacgagcagagcaacttcgagaagggcaagagcatcaccaccaacgccgagagacagatgaagcacagcgcccggatcaacctgcagcggtacaagctgagaagagagcacctgatcgactacctgaccaaggccggcttcatcaatgagggcaccctgctgtgcgagaacggcaacagaaccaccttcgagacattccggctgagagccaaggccgccaatgaggaaatctctctgtctgagctggcccgggtgctgctgatgatcaacaagaagcggggctacaagagcaaccggaaggccaatggatctgaggaaggcgccctgattgacggaatggccgtggccaagtacctgtacgagaacgatatcacccctggccagtacgcctacgagctgaagaagaaaggcaagaaacatctgcccgacttctaccagagcgacatcatggacgagctggacaagatctggaacttccagcagcctttctaccccaacatcctgaccgacgagttcagacaggtgctggccggcaagtccaagaccaacagcacaaaactgtttctggcccggtacagcatctacacagcccagaacaaagaaaaggacaaggtgctgcaggccctgaagtggcgatctgatgccctggctagaaagctggatatcgagcagctggcctacgtgatctgcgagctgaacggcctgattaacaacgccagcgattacctgggcaagatcagcgacagaagcaaagagctgttcttccagaacctgacagtgggccagtaccagatgaagatgctggacgagaaccccaacgtgtccctgaagaacatggtgttctataggcaggactacctggacgagttcgagcggatttgggagacacaggccaagtttcaccccgagctgaccagagagcggaagaaagaaatcggcaacatgatcatcttctatcagcggcccctgaagtctaagaagtccctgatcagcatttgcgagctggaaggcaagcagatcgaggtggaagtcgagggcaagaaaaagaccatcaccgtgggcagcaaagtgtgccctaagagcagccctctgttccaagagttccggatctggcagcggctgaacgacattgagctgaccgatctgagcacccggcagaagtacggcctgaatcaagagcagaaagaactgctggccaaagaactcgagtacaagcctaagatgaccaagcagcagatgctgaagtgcctgagcctgaagcctaaggactacgacatgaacttcaaagaggtggacggcaacaccactcaggccatgctgttcgaggcctaccggaagatcatcgagatgtctggacacggcgagcacgacttcagcaagatgtctgccagcgatatcagcaccctggtggaatccgtgttcgccgctctgggctttaataccagcgtgctgcactttgatgctcaggccgccgatatctcccaggacagcatgtatcagctgtggcacctcctgtacagctacgagagcgataacagcgccatgggcaacaaggccctgatctgcagaatccaagaactgttccacttcgacagcgacgagtacgccaagatcctggctggcatcagcttcaagcctgactatggcagcctgtccgccaaggccatcaagaaaatcctgcctttcatgaaggaaggcaacgactacagcaccgcctgtgtgtacgccggctacaaccacagcaagcggagcctgaccaaagaggaactggacaacaagcctctgaaggaccacctggatatcctgagcaagaacagcctgcggaaccccgtggtggaaaagatcctgaaccagatgatcaatgtggtcaacagcctcatcgacacctacggcaagcccgacgagattagaatcgaactggcccgcgaactgaagaagtccgccaaagaaagggaagccatgaccgacgccatcaacgccgccaacagagagaacgaagagtacaagaagatcctcgaaaccgagtttcacatccctcacgtgtcccggaacgacatcctgagatacaaactgtacctggaactgaaggacaacggcttccacacactgtacagcgacacttacatccccagagagaagctgttcagccgggacttcgacatcgagcacatcattccccaggccagcctgtttgacgacagcttcagcaacaagacactggaaagccggtccatcaacatcgagaagtctaactccaccgcctacgactacgtgaagggcaaatatggcgaagagggcgccaagaactacaagaccagagtggaagatctgttcaagaacggcaccatcagcaagaccaagatgactaagctgctcatgaccgccgacgacatccccaccgacttcatcaacagagatctgcgggacagccagtatatcgccaagaaggccagagagatcctggaagagatcgttagagtggtggtgcctaccaccggcagcatcaccgacagactgagagaagattggcagctggtggacgtgatgaaggaactgaactgggataagtacgaccagctgggcctgaccgaaaccttcgaggacaaggatggcaataccatccggcggatcaaggactggaccaagagaaacgatcaccggcaccatgccatggacgccctgacaatcgccttcaccaagcctagcttcatccagtacctgaacaacctgaacgccagaagcgaccgcagccagagcatctacggcatcgagagaaaagaactgtatcgggacaagcacaacaagctgcggttcaaccctcctattcctctggatgagttcagaaccgaggccaagcggcacctccagaacatcctggtgtccatcaaggccaagaacaaggtggtcacccggaacgtgaacaagacaaagtgcaaagagggcttcaacaccaaggtgcagctgaccccaagaggacagctgcacaacgagacaatctacggctcccagcagagatacgccatccacgaggaaaaagtgggcgccagctttaccgccgagaaaatcgccaccgtggctaacaaaaagcagagagaggccctgctggctagactgcaggcctacaacaacgacgccaagaaagccttcaccggcaagaacgccctggataagaaccctgtgtggctgaatgaggcccacaccacctctgtgcccctgaaagtgaagtgtctgaccatggaaaccatctacaccatccggaagcctatcaacaaggacctcaaactggataaggtggtggacagccggattaagcagatcctgcagcagagactggacaagtacaagggcgacgccaacaaggctttcagcaatctggacgaaaatcccatctggctcaatcaagagaagggaatcgccatcaagcgcgtggccatctttggagccgtgtctgccaaagccattagagacaagcgggacaaatacggccacttcctgctcgatgagaacaaccagcaccagccaagcgactacatcaataccaatggcaaccaccacgtggccttctacgtggacaaagagggaaacatccacgactatatcgtgaccttcttcgaggccgtgatcagagccatcaatggctttcccatcatcgacaaagagtataacaagtccatcggctggaactttctgttcaccatgaagcagaacgagtacttcgtgttccccaacacaaagaccggcttcaaccctaaagagtacgatctgaccaacgagagctactaccacctgatctccccaaacctgttcagagtgcagtccatctccaagaaagagtatggcaacgccgtcgtgcgggacttcatcttcagacaccatctggaaagcagcgtgaacgtgtccattaaggacatcacctacaagcaaatgaagtctctgagcttcgtgaaggacatcgtgaaagtgcgcctgaaccacatcggccagattgtgtccgtgggcgagtactga

SEQ ID NO: 105 - DNA, 3294 bp, Artificial Sequence
  Synthetic sequence or sequence of unknown origin
atgctgccttacggcatcggcctggatatcggcatcacatctgttggatgggccaccgtggctctggacgagaatgatagaccatacggcatcatcggcatgggcagcagaatctttgatgccgccgagcagcctaagacaggcgaatctcttgctgcccctagaagggccgctagatctgctagaagaaggctgcggcggcaccggcacagaaatgagagaattagagccctgatcctgcgcgagaatctgctgtctgaaggacagctgctgcacctgtacgatggccagctgtctgacgtgtacagcctgagagtgaaggccctggatgagcgggtgtccaacgaagagttcgccagaatcctgatccacatcagccagcggagaggcttcaagagcaatagaaagggcgccagcagcaaagaggattctgagctgctggccgccatcagcgctaatcaagttcggatgcagcagcagggctacagaaccgtggccgagatgtacctgaaggaccccatctaccaagagcacagacggaacaaaggcggcaactatatcgccaccgtgtctagagccatggtggaagatgaggtgcaccagatctttaccggccagagagcctgcggaaatcctgccgccacaaaagagctggaagaggcctacgtggaaattctgctgagccagagaagcttcgacgatggccctggcgacggatctccttatgccggatctcagatcgagcggatgatcggcaagtgccagctggaaaaagaggccggcgaacctagagccgccaaggccacatacagcttcgagtactttagcctgctggctgctatcaacaacatcagcatcatcagcaacggccagctgagccctctgaccaaagaacagagagagatgctgatcgccctggctcacaagaccagcgagctgaactacgcccggatcagaaaagaactgggcctgagcgaggcccagagattcaataccgtgtcctacggcaagatggaaatcgccgaggccgagaaaaagaccaagttcgagcacctgaaggcctaccacaagatgcggagagagttcgagagaatcgccaagggccacttcgccagcatcaccatcgagcagagaaatgccatcggcgacgtgctgagcaagtacaagaccgacgccaagatcagacccgctctgagagaagccggactgaccgagctggatattgatgctgctgaggccctgaacttcagcaagttcggccacatctccatcaaggcctgcaagaagatcatcccctggctggaacagggcatgaagtacagcgaagcctgcaacgccgctggctacaactttaagggccacgacggccaagagaagtcccatctgctgcctccactggacgaggaatcccggaatgtgatcacctctcctgtggctctgagggccatctctcagaccatcaaggtggtcaacgccatcatcagagagaggggctgtagccccacctttatcaacatcgagctggcccgcgagatgagcaaggacttctacgagcggatcgagatcaagaaagagcaggacggcaaccgggccaagaacgagagaatgatggaacggatcaggaccgagtacggcaaggcctctcctacaggccaggacctggtcaagttcaagctgtacgaggaacaaggcggagtgtgcgcctactctctgaagcagatgtctctggcccacctgttcgagcctgattatgccgaggtggaccacatcgtgccctacagcatcagcttcgatgacggctacaagaacaaggtgctggtgctggccaaagagaatagagacaagggcaacagactgcccctgcagtacctccagggcaagagaagagaggactttatcgcctgggtcaacagctgcgtgcgggactacaagaagcggcagagactgctgaaagagagcatcagcgaggacgacctgcgggccttcaaagagagaaacctgcaggataccaagaccgccagccggttcctgctgaattacatcagcgaccacctcgagttcacccagttcgccaccgagagaaagaaacacgtgaccgccgtgaatggcagcgtgacagcctacctgagaaagagatggggcatcaccaagattagagagaacggcgatctgcaccacgccgtggatgccctggttattgcctgtaccaccgacggcatgatccagcaagtgtccagattcgcccagcacagagagaaccagtactccctggccgaggactccagattcatcatcgaccctgaaaccggcgaagtgatcaaagagttcccctatccttggcctcggttccggcaagaactggaagccagactgagcagcaatcctggactggccgtcagagatagaggcttcctgctgtacatggccgagagcattccagtgcaccctctgttcgtgtcccggatgcctagaagaaaagtgaccggcgctgcccacaaagagacaatcaagtctggcaaggcccagaaggacggcctgctgattgtgaagaagcccctgaccgacctgaagctggacaaagaaggcgagatcgccaactactacaaccccatgagcgaccggctgctgtacgaagccctgaagaagagactgaccgccttcaacggcgacggcaagaaagccttcgccgatcctttctacaagcccaagtccgatggcacacagggccctctggtcaacaaagtgaagctgtgcgagccctccacactgaacgtgtccgttattggcggaaaaggcgtggccgaaaacgacagcatggtccgaatcgacgtgttcagagtggaaggcgacggctactacttcgtgccagtgtacgtggccgataccgtgaagcctgagctgcctaacaaagcctgcgtggccaacaagccctacaccgactggaaagaaatgcgcgagagcgacttcctgttttctctgtaccccaacgacctgctcaaagtgacccacaagaaggctctgatcctgaccaaggctcagaaagacagcgacctgcctgactgcaaagaaacaaagtccgagatgctgtactttgtgtccgcctccatctctacagccagcctggcctgcagaacccacgacaacagctacagaatcaacagcctgggcatcaagaccctggaagccctggaaaagtacaccgtggacgtgctgggagagtatcaccctgtgcgcagagagacaagacagaccttcacaggcagagagagcagcggccacagcggcatttcttga

SEQ ID NO: 106 - DNA, 4110 bp, Artificial Sequence
  Synthetic sequence or sequence of unknown origin
atgaagaaggtgctgggcctcgatctgggctctgcctctattggatgggccgttgtgaacgtggccgagacaaaagaggaaaaggccgccatcctcggctgcggctctagagtgattcctatcagcgccgaagagaaggacagcttcgagaagggcaaagccatcagcaccaacgccgacagaaccctgaagcggggcatgagaagaaacctgaagagatacgagcagcggcgggacgacctgagaaggctgtttatcgatcaaggctggatcagcgacggcgagcctctgtctgagagcggcaagaatagcacctacgagacactgtacctgcggagcaaagccgctcaggacgagatctctctgaaggacctggccagagtgctgctgagcatcaacaagaagagaggctacaagagcagcagaaagaccgattctggcgaggacggccagctgatcgatggcatgtctattgccaaagagctggccaagacaggcaagacccctgccgaatttgccctggaatccatcaagtccggcaagagcggaaagttcgacttctacagaagcgacctcgagaaagagttcgaccggatctgggattgccagcagagcagctatcctgagctgctgaccgacgagttcaagagccagctgagcaagatgaacaagaccggcgccaccaaggcctttttcgccaagtacaagctgaccaccgccgagaacaaaggcaaggacagactgcggaatagcctggaatggcgggtgtcagccctgaaagagcccctggacaaagaaaagatggcctacgtgatctgcgagctgagaggcgccattcagtctagctctggctacctgggcgacatcagcgaccggtctaaagagctgtacttcaatcaagagacagtgggccagtacctctaccggcggatcaaagaagagaaaggcttcagcacccggaaccaggtgttctataggcaggactacatcgatgagttcaacaccatctgggccacacagagcgccttccatccagagctgaccgatacactgaagcggaagatcgccgaccgcatcctgttttaccagcggcctctgaagtcccagaagggcctgatcagcttctgccagttcgagagcagacccatcaaagtgatcatcgacggcaaagagaaaacccggaccaccggatctaaggtggcccctaagagcagccctctgttccaagagttcaaggtgctgcagatcctgaacaacgtgaccatcaaggaccggcggaccttcgattctagaggcctgggaaaagaagaaaaagagtccctggccgccacactgcggatcagggaaaagatgaagggcagcgacgccctgaagcagctgggactcgaccctagaagatacgacctgaactacaaagaactcgagggcaacagcaccctgttcagcctgttctccaagtacatcgagatcgtgaacctggaaaagaacagcgagtacgagctgcagaagatggcttacgagaaggccctggaagtgatccgggacaccttcaacaagctgggctgccacagcgacatcttcaccttcaatagcgacctgcctaaagaagagtacgaacagcagcccatcttcaagctgtggcatctgctgtactcctacgagggcgataagagcgtgaccggaacagcctctctcgtgcggcacatcatggatatctctggcctgcctgagcctcagagcaagattatcgccggcgtgtcctttaacaacaactacgccagcctgagccacaaggccatcaagaaaatcctgccttacatgaaggaaggccaccagtactccgatgcctgtgccatggccggctacaaccacagcaatagcctgaccaaggccgacatcgaaaacaaagtgctggtggactctctggcccagctgccaaaaggcgcactgagaaaccccgtggtggaaaaagtgattaaccagatgatcaacgtggtcaacgccgctgccgaggcctatggaaagcctgatgagatccacatcgagctggcccgcgagctgaagtctagcgccaaagaaagagagcaggccaccaacggaatccaggccggcaacaagcggaatcaagaaatcgagcagatcctcaagagcaagttcaacatccagcagcctagcaagaacgacatcctgagatacaagctgtacgacgagctgaaagagaacgggttcaagaccctgtacagcaacaagtatatccccgagagcgccctgtttagcaaggacatcgacatcgagcacatcatccctcaggctctgatgttcgacgacagcttctccaacaagaccctcgagtacaaggatatcaatatcgagaaaggccgcaccaccgccaacgacttcgtgaaggctaagtacggcgacgagggctacgcccagtactgccagagaatcgagtacctgtactccaagggcgtgatctccaacgccaagcggaagtacctgctgatgaccgaggccgatattcccaccggcttcgtggacagagatctgagaaacagccagtatatcgccgtgaagtcccgcgagatcctggaagattacgtgaaggtggtggtgcctaccaccggcagcgtgacagatagactgagacaagagtggcagctcatcgacgtgatgaaggaaatcaactttgccaagttccggaccgccggcaagacctacacagccatcgatagcgagggccgcaagaccgagaagatcaaggattggaccaagagaaacgaccacagacaccacgccatggacgccatcacaatcgcctttaccaagcctcagcacatccagattctcaacaacctgcgggccaagtgcgacagcaacgaagagtttagacagctgctggacagccagaccaccgacaccggcaagaagaggatcttcacccctcctatgccactggaccagctgagagccgaagtgaagaaacacctggatgccgctctggtgtccatcaaggccaagaacaaggtcgtgacccggaacgtgaacaagatcaagcaggcaggcggcatcctgcggaaaaccgaacttacacctagaggcgccctgcacaaagagcaggtctacggcaagagaagagtgtacgaagtgttctacagccccgtgaacgccaagatgaccgaagaggccattgccatggtggcctctccaaaagagaaagaagccctgctggccagactggccgagtttggcggagatgccaagaaggcctttaccgggaagaacagcctggacaagaaccctctgtatgtgggcgccgagcagattcccgccaaagtgaagtgcgtgcggtttaaggacatctacagcatccggaaagagctgagccccgacctgtccatcgacaagattctggataagggcgttaaggccaaggtcgaggaaaggattcaagagttcggaggcgacgtgaaggccgccttcgccaatctggatacaaaccccatctgcctcgacaacgacaagacaatccccatcaagagagtgaccatcggcgagaacttcgacctgaccgccatccggaacaagcacgacaaggatggcagactgattctggacaagtctggcaaccccattcctagcgactatgtgaacctgcgcaacaaccaccacattgccctgtacatcgacgccgacggaaatgtgcaagaggccgtggtgccaatgttcgaggccctgaaccggatcaacatgcagatccctgtggtggataagaactaccactccgacctcggctggacctttctgttcagcatgaagatcaacgagatgttcgtgttccccgacaagaataccggcttcaaccccaaggacattgacctgctggaccccgccaatagcagcctgatctccccacacctgttcagagtgcagaaactgagcagcaaggactactacttccggcaccacctggaaaccacaatcggcgacgacaacagcctgagagacatcacctggaagagaatcaagaccatccagctgatggccgacgccgtgaaagtgcggatcaaccacatcggaaagatcgtggccgtgggcgagtatgactga

SEQ ID NO: 107 - DNA, 3678 bp, Artificial Sequence
  Synthetic sequence or sequence of unknown origin
atggaaaacgtgatcaagcagagaatcctgggcctcgacaccggcacaaattctcttggatgggccgtcgtggatagactgcctctcggaggatacgagctggtggataagggcgtgcagatcttccaagagggcgtgaacatcgagaagggcacccaagagaagtccagagccgccgagagaacaagccacagaagcctgagaaagctgtactggcggcggaaagtgcggaagatcagactgctgacagtgctgagcaatgccggcctgtgtcctagcctgacatctcaagagctgagagcctggcggatgaacggcaagtaccctctgaacaatatcgccttcatgcggtggcagctgaccgacgagcagaagggcatcaatccttacgccgccagatgcagatgcgtggaagaggaactggacatgagcagccccgacaacagatatctcgtgggcagagccatgtaccacattgcccagagaagaggcttcctgagcaaccggaaggaccagaccgacgacaaggacaaagaatctggcgccgtgaaggccggaatcaaagagctgacacagaagattcacgacgccggctgcgagtacctgtgccagtacttttaccagctgtaccagaagggcgagagaatcagaagctgctacaccgaccggaaagagcactacgagcacgagttcgatgccatctgtgccaagcagcacctggatgagtctctggtgcagcagctgagaaaggccatcttcgagcagaggcccctgaaatctcagcggagaggcgtggccaagtgtccctttgagccttctaagcactgcgcccctgtgtctcacccactgttcgaagagttccggatgtggtccttcatccgcaacatcaagatgcagacccctgaggacgccgagctgagaatgctgaccaacgaagagatcgacaaagtgaagcacctgtggttccggaagtccaaggccaactttccattcgaggatatcgccaagactctggccggcaagggcaagtactgttactacaagagcgccgaggataagccctaccggttcaactactacatggacacctctgtggccggctgtcctgtgtctgctcagctcagagatgtgttcggcgaggacctgctgaaggatagagcccaggtggactctatctggctggccctggatttcttcgacgacgacctgaagctgagagagtgggccatcaagcactacaacctggccgatgagcaggccgacgcctttgtgaaaattagactgccacagggctacgccagcctgagcctgaaggccatggaaaacatcgtgcccctgatgcgcgaccacggcatgaactatcctaatgccacactgctggccaagctgcgggacctgaccaaggattaccccttcgagaaggacttcgacgaggacgtggaagcctatctgaaggccgacatcgaggaatacctgacaatccccaccgacaagaatggcaagcctctgatgtcccgggaagagagaaaagaggccctggacgtcaagtggatgcagcactataatctgagcgccaaagagatcaagaagctgtatcaccccagcatgatcgaagagtacagacacgtggaacacaccaccaacggcgtgtaccagctgggctctcctagaatcagcgccctgaagaaccctatggccatgcggagcctgttcagaatgaaggccgttgtgaaccagctgctgaaagacggcaccatcgacgagaacaccatcatccacatcgagttcgccagagagctgaacgacgccaatagacgggccgctctgagaagatatcaggctgccctgcggaaagagagagaggacgctgttgaggccatcaaagagttcatccccaatcctagcgacgacgatgtgctgaagtacctgctgtggaaggatcaagagggcaaatgcgtgtacaccggcaagagcattagcctgagcgccctgtacaatggcaccgagtttgacatcgagcacaccgtgcctagatccatgggcggcgataccaccagagagaacctgaccatctgcgacgccaagttcaaccgggaaatcaagaagaaccggctgcctagccagctgagcgaacaggcacaagaactgctgcaggccaacatccagacctggaaagagaactgcgaagccctggacaagcagctgcgcaagatgaagaatgccaccagcggcctgtccaccaaagaggccaaagactccgtcattgccaagcggcatctgctggaaatgcagcgggatttctggcggaacaagtacaaggccttcacaatcgaagagaaggacgtgcagggcttcaccagaaggcagggcacagacatcagcgtgatctccagatacggcagactgtatctgctgtccctgttcaacagagtggacgtggtcaagggcagcatgaccgccgcctttagaaagatctggggcatccagacagcctacgagaagaagaacagagaaaaccacgtgcaccactgcatcgacgccatcacaatcgcctgcatgggcaagagagagtacgacgagctgagcgcctactaccacgccgacgaggaaaacaagtaccacagcagcgacatcctgatgccaaagccttggaaaaccttcaccgaggacatcaaggatatcgagcaagagatcctggtggcccactacaccagcaatcctatgggcaagcagaccaagaagaagctgagggactccagaggccacatcatcagggatgccaacaagcagcctagattcgcccagggcgatacagctagaggcgccctgcacaacgacatgatctacggcatgatcgtgaacagccagaacgtggacgataagcacaaagtgggcaacctgtgtgccgtgaagcggatcattctgagcagcgtggcctccaaggatgaggaaaagatggccgccagcatcgtggaccccatcatcaaaaagaccgtgaacgatgccagagccaaatacggctctctgtctgccgccatcgaggccgaacaagagaatggcgacggcagcatctggctgaacaaagagaagaacgtcaagatcaaaaaagtgcggtgcttccaggacttcgccatcaacgcttccccaatcagatccctgagggaccagtccaagaaagagtacaagcggagccactactccatgaccaacggcaacttcatgagcgccatctacgagggcaccgacgccaaaggcaagaaaaagcggagcttcgtgatcatcagcctgtacgaagccgctcaggcctacggaaaacacgaacctctggtgcctaccgtgtctgaggaaggctacgccctgatcaagaccatcagactgggagatctggtgctgctgtacgagaacagccccgaggaaatctacaccgccagccaagaggaattggtcaagcggatgtacgagatcatcggcatgagcgacagcaagggactgcagatcaggctgaagcaccagcaagaggccagacctaatggcgagctgcagcagatcaacggcgccttcaaaaatggcgacagcgcccctatccggatgctgctgcatacccagttcaatgccctggtgcagggccaagacttcgacatctccgacacaggcaagatcaccttcaagtcctgctga

SEQ ID NO: 108 - DNA, 3768 bp, Artificial Sequence
  Synthetic sequence or sequence of unknown origin
atgaagaacatcctgggcctcgatctgggcacagcctctgttggatgggccctgatcaaggtggacgacaacaacacccctatcgacatccaggacatcggcgtgcgaattgtgcctctggccgagaacgagggcgataagttcaccaagggccagaacatcaccgtgaacgccgacagaacaagagccagaggcgccagacggaacatcgacagatttcagctgagaaggcaggccctgaccgaggaactgagaagcctggatatgctgcccgacgagaagctgatcaagctgcccgttatggaactgtggcagctgagagccaacgccgccacacagaaggtgtccctgaaagagctgggcagaatcctgtaccacctgaaccagaagcggggctacaagcacagcatcaccgaccagaacgatagcaagcagcgggcctacgtgaaagagatcaacaaccggtacagagagctgaaagagacaggcctgaccatcggccagttcttcgcccagaaactgagcgagacagccgtgtccaacgactgcaagtgcttctacgtgttccggatcaaggaccagatctaccccagaaaggcctacgaggaagagtacgaccggatcatgaagtgccagcaagagttctaccccgagatcctgaccgacaacaagattaacaagatccgcaacgagatcatctactaccagcgggacctgcggtcttgcaagcacctggtgtctatctgcgagttcgagaagaagtgcttttacgacgccaacggcgaagtgaagcggaacaagaaaggcgagatcgtgtacgacggacccaaggtggcacctagaacaagccctctgttccaggtgttcaagatctggcagtccatcaacaacatccggttcagaaaccggcagaacgagtacctgtacatcaccaaagagcagaagcagaatatcgccgagatcatggacaagcaggacgtgctgaagctgaaggacgtgcagatcaccctgggcatcacaagcaagagcggctggtacagcgaccaggccatcaagaacggcatcaagggcaacaccaccaagcacgagattctgagcagcctgtctagcctgcagcagagccagatcgacaagatcacccggttccacctggaaaccgtggacaccaacatgatcgacgaggaaaccggcgagatcctcgtgcggattaagggcagctaccagaaagagcccctgtaccggctgtggcacatcatctacagcatcaagaatgacaaagagcgcctgaacgccatcgagaagtttctgtacgagttcgacatcatcgacaaggacgtggccgaaaagctgaacaacatcgacttcgtgacccctggctacgccaatctgtctagcaaggccatctgcaagatcctgccttacctgatggacggcatcgactacagcgacagctgcgagtacgtgggctacaatcactctggcagcctgacaaaggtggaaaacgagaatagagagctgctggatcagatccccgccattaagaagaacgagctgaggcagcccaccgtggaaaagatcctgaatcagaccatcaacgtgttcaaccagatcaacgtggaactcaacaaaaagggcgagagaatcgacgaagtgcggatggaactggccagggctctgaagcagtccaaagaggaacgggaagaaaccgaccggggcatcagaaaacagcagaagctgaacgaggaatacgccgaaatcctgaagtccgacaacatcagacccacacggaaccggattctgaagtacagactgtggcgcgagtccaacgagacatgcttctattgcggccagcctgtgaagttcaacgagttcctgaagtttaccgagatcgagcgggaacacatcatccccaagcggctgatcttcgacgacagcttcgccaatcaagtgtgcagctgccggaagtgcaatgccgagaaaggcggaagaacagccctggactacatgagaaacaagcccaacctgcaggcctacctggacaaagtgaaccagatgttccaggacaagaagatcaacagcaagaagcacagccatctgctggcctcttacgacgactatcttgtgcggaaggccgagggcaaagaaacaaaggatgacgtgcggatctgggaagaacccatcgatagacagctgagactgagccagtacatctccaagaaggcccaagagatcctgcggaccgcctgcagagatgtgatcgccacaagcggctccatcaccgagtttctgagaaacacctggggctacggcaccatcctgcacgacctgaatttcaactgcttcaaggacgccggcctgaccgataccatcatcgaggaagataccggccggaccagggaagtgatcaagaactggaccaagaggctggaccaccggcaccatgccattgatgctctgacagtggcctgcaccagccggtctatcgtgcagagaatcaataccctgcacgccagcagagaggacctgagaaaagagattaaggccagccggaaggactggcaggacaacaatctgctgctgcagtggacaaaagagaagaagcccttcgaccggcacttcgtgctggaaaaaatcgcctccatcctggtgtccatgaaggccggcaaaaaggccacagtgcccggcaagcggaagatctacaagaatggcaagcctatcaccgtgcagaccggcctgagaatccctagaggacagctgcacgagcagaccatctacggcgctatcacacagttcctcaaggataagaaaggcaacgtgtcccagaccaaagaatacgtcgtgcggtacaagatgggcgtgggcagcatgggctatgtgttcaacggaaaagaaacctgcgacgtggtgtacaacaagaagaaggactgctacgagatcaaggatggcatcgaagaggccattaactacatcgtggataagcacatccgggacgtcgtccggaagcggatgaatgaagcctttcctgagggcgagtcctacagaacaggcgccgaaaaagctctggctgagggcagagtgtacaacggcaaagagagatcccagaaggccctcgagcagctgaagtccctgtccgagaatcccctgtacaccgacaaagaacacaagatcgtggtcaacagcgtgcggtgctttacaggactgcatgctgtgcagcccctgcggagaaatagcaagaacgaggccatcagctacgtgctgaccaagaacaaccaccacgtggccatctacaccgatgagaacggcgactacaaagagatgatctacaccttttggcaggccgtggaacggtccaagtacaagctgcctctgatcattaaggatgtgaacgccctgtggaacgagatccggcagagagagaaggacggcgagcactttcctgacgagctgatccagagcctgcctatgcctaactggatcttcatcgagtccctgcagctgaatgacatgttcgtgatggacaccgacgacgagacattcgagaactatatcgccaccaacaactacgaagagatcggcaagagcctgtacagagtgcagagcatctccaccagcgactactttttcagactgcacagcgacaccaccagcatcacaacacaagaggccgctctgagcaagcggttcatcagaatcaagagcttcaagtcttacaagaaccacaatcctcacaaggtgcacatcagcctgctgggcaagatcatcaactga

SEQ ID NO: 109 - DNA, 3294 bp, Artificial Sequence
  Synthetic sequence or sequence of unknown origin
atggagtacaccatcggcctggatatcggcgtggcatctgttggatgggccgtgctggctgatgattctcagggcgagccttgccacatccaagatctgggcgttagagtgttcgaggccgccgaacatcctcagacaggcgcttctcttgccgctcctagaagagaagctagaggcgccagacggcggatcagaagaagaaggcaccggaaagagcggatcaaggccctgcttgtgaaaggcggcgtgatcacccaagaggaaatggacagactgttccagaacagcggcttcgcccaggacgtgtacacactgagagccgaaggactggaccggtgtctgacacctgaggaatggacaagagtgctgctgcacctgagccagagaagaggctacagaagcaatagcaccgccgaagccgccaaggacaaagaaacaggcgtgctgaaacaggccctggccggaaatcaggctctgatgcaagagaaaggctatcggaccgtgggcgagatgttctgcagagatgagaagttcctgttcgtgggccccgacggcaatctgtggcggaaaacacataacacccctggcgactacagcttcaccatcaccagagacatgatccagcaagaagccgccgctctgttcgccgctcagagaaactacagcaacccttacgccgacgaggccctggaagaacagtacaccaagatcctgctgagccagcggcacttcgatcaaggacctggcggcaattctccctacggcaaaggcgatctgcggggcttctgtaccttcgagcctcaagagagaagggccttcaaggccacctacaccttcgagtacttcaagctgctgcaggacatcaaccacatccggattctgagccccagcgagcccacaagaaagctgacacagcctgagagagagcagctgatctccctggccatggaaagccctagcctggattttgccagagtgcggaaggccctgaatctgcctcctgagtgcagcttcaacgtggtgccctacgagagagacaaagaggaagccgagaagaagcggaagttccctcagatgcagagctaccacactctgagaaaagccctgaacaccgtcgagaagaactacatcacccacctgacatacgcccagctggacgagatcggcacaatcctgagcctgtacaaggccgacgacaagagacaagaaggcctggaagccctgggactgtctcagcaagtgattgatgccctgctgcctctgagcttcagcaaggctggaaatctgagcctgaccgccatgaagaagctgatcccattcctggaacaggggatcaactacgacgaagcctgcagagaggtgtacggcgaccatagaagaatggctggcggccagcggtacagatacctgacactgaacaaagagctgtgggactctggcgccctggacgccattacaaatcctgtggtgctgagagccctgtctcagaccacaaaggtgctgaacgccatcatcagaagatacggccctccacagcggatctgcattgagctggccagagagatgagcaacaacttcgaccagcggaacaagatccagaagagaaacgaggaaaaccgggccaagaacgagaagctcatggaacagattcagaagctgaagaacgccagacctaccggccaggacctcgtgaagttcagactgtaccaagagcaggacggcatgtgcctgtacagcggcacacagctggatatggaaaggctgttcgagcccggctatgtggacgtggaccacatcatcccttacagcatcagcttcgacgacagcaaccggaacaaagtgctggtgctggccaaagaaaaccggcagaagggcaacagaatccccatggaatacctggccagcgatcccgagagaagagagcggtatatcaccctggtggaaagatacgtgcgggactaccggaagcggcagaagctgctgaaagagaaactgaccccagaggactgccagggctttaaagaacggaacctggtggacacccagtacatcaccaggaccatctacaacctgctgaaggactacctcgagttcagcccctctgcctctaagacacctgtcagagctgtgaatggcgccgtgaccagccacatgagaaggatgctgggcctgaccaagcacagagaagatggcgacctgcaccatgccatggatgctgctgtggtggctgtgaccacacctggaatgatccagaaaatcagcagatacgccaagcggcgcgagctgggacagaaagtcgtgggcaaatacgtggacccagagacaggcgaactgctgtcccaggccgacttcgataagaagtacgcccctgagttccccgagccttacgacggctttagacaagagctgctcgccagactgagccccgatcctgataccagaatcagagagctgcatctgccccactatgacgacggcggagagatcagacccgtgttcgtgtcccagatgcctcggagaaaagtgacaggacctgctcacgcccagaccatcagatctggaaagaaacctggctacgccctgtccaagaaggctctgaccgagctgaagctggacaagaatggcgagatcgccggctactacaaccccaaggacgacgtgctgctgtacaacgccctgaaagccagactgcaggcctataatggcgacgcccagaaggctttcgcccagccttttcacaaacccaagaaggacggcacagacggccccgtggtcaacaaagtgaagatcctggaaaagtccagcctgaacgtgtccgcctgcggcggaattgctgataatggcggcatggtccgaatcgacgtctacagagtgcccgaggatggctactacttcgtgcctgtgtataccgccgatgtggtcaagggcgtgctgcctacaaaagccgtggtggctctgaagggctacgacttctggaagcctatggaagcccagcacttcctgttcagcctgtatcctggcgaccttgtcagagtggtggccaagaaacccatcaacatgaagctcaagaacaagaatgccaagggcgagctggaactgctgaggaaagagtggctgggctactacgtgggcgccaacatctttaccgcctctatcgccatcagcacccacgaccggaaatacgtcagagatggcatcggcgtgaaaaccctgctgctgctcgagaagtatcaggtggaccctctgggcagctaccagaaagtccatctgcctgagaagagacaggacttctga

SEQ ID NO: 110 - DNA, 4014 bp, Artificial Sequence
  Synthetic sequence or sequence of unknown origin
atggtgcaggactactacctgggctttgatctcggcacaggatctctcggatgggccgtgaccgacgagaactatgagattctgagagcccacggcaaggccctgtggggcgttagactgtttgagtctgccaagaccgccgaggaaagacggaccttcagaaccagcagacggcggctgaacagaagaaactggcggattgagctgctgcagggcatcttcgccgaagagatcaacaagatcgacgacggattcttcctgcggatgaaggaaagcagatacctgcctgaggacaagaagaacaagagcggcggagtgcctcagctgccttacgctctgttcgtggacaagaactacaccgacaaggactaccaccggcagttccccaccatctaccacctgagaaagtggctgatggaaacaaaagagatccccgacatccggctggtgtacctggccttccaccacatcatgaagcaccggggacactttctgctgagcggcgacatccgcgagatcagagagttcaagaccaccttcaagcagttcatcgaggtggtcaagaacgaggaactggacttcaccctggaaatcgaggaagaacagtaccccaacgtggaacagatcctgaagaacaaccagatgacccggaccgccaagaaaaccgagctgatcaagtctctgaaggccgcctctggctgtgaaaaggccctgctgaatctgatcagcggcggcacagtgaagctgagcgacatctttggcgacaagcagctggatgagagcgagaggcctaagctggccttcagcgatatcggctacgatgagtacgagggcgagatccagtctgtgctgggcgagcagtacatcatcattgagcacgccaaggccgtgtacgattgggccgttctggccgatatcctggacggacaggatagcatctctgccgtgaaggctgccctgtacgagaagcacaaggccgacctggtgtatctgaagaagctggtcaaagagaatctgcccgccaacatctacaaagagatcttcaccaagaccgaggaaaagatcagcaactacagcgcctacatcggcatgagcaagaagaatggcaagaagcaagagatccagggcaagagatgcagcaaggacgacttctacaagtacctgaagaaacaagtgatcgagcggatcaacgacgagaaagtgaccgagtacctcaaagaggaaatcgaccggggcaccttcctgcctcggcaagtgatcaaggacaacagcgtgatccctcaccagatccacctgtatgagctgaaccagatcctgtccaacctgcaagagcacatccctctgctgaaagagcagggcgagaagatccggaagatctttaccttccggattccttactacgtgggccctctgaacggcgtggaaaagggcaaagagcggaccaactgggtcaagagaaaaggcgagggcaagatcagcccctggaacttcgaagagattatcgacgtggaagccagcgccgagcagtttatcagacggatgaccaacaagtgcacctacctgatccacgaggacgtgctgcccaagtacagcctgaagtacagcaagttcatggtgctgaacgagctgaacaacctgagactggacggcgagcctatcagcgtggaactgaagcagaaaatctacctggaagtgttccagcggaaccgcaaagtgacccagaaaaagctgaaggattacctcatcagagagggaatcgccgccaagacagtggatattacaggcgtggacggggacttcaagagcagcctgacagcctaccacgacttcaaagaaaagctgaccggcgtgaagctggaagaggaagagaaagagtccgtcatcctgaacgtgaccctgttcggcgacgacaagaagctgctgaagaagagactgaagggcctgctgccacagctgtctgatggacagctgaccagcctgtgcaatctgccttatagaggctggggcagactgagcgagaagttcctggattctatcgtggcccctgctcctgagacaggcgaagtgtggacaatcctgagaggcctgtgggagagcaacgacaacctgatgcagctgctgtccgagaagtactacttcgccgacgccatcgaagaggaaaacggaaaagagggctgtaaagagatcagctaccagctgatccaagagctgtacgtgtcaccagccgtgcggagacagatttggcagaccctgctgatcgtgaaagaactgtgcaaggtgctcggcggacctcctaagagggtgttcgttgagatggcccgggaaaagacagccaagggcagaacccagtccagaaagtccagactgctggaactgtacaagaagtgcaagaccgaagagaacgagtgggtcgaagaactgaaccacaccgatgagagcaccctgcggggcgataagctgtacctgtactacgtgcagaaaggccggtgcatgtacagcggcgagagaatcgaactgtccgagctgtgggacaaccagaagtacgacatcgaccacatctaccctcagagcaaagtgatggacgacagcctggaaaaccgggtgctcgtgaagaaggtgtccaacgaagagaagtccgacagataccccatcagcgagaacatcagaaagaagatgcagcccttctggaagtccctgctggacggcaacttcatcaccaaagagaaatacgagcggctgatccgggccaccgagtttgaaccagaagaactcgccggctttatcgccaggcagctggttgaaaccagacagggaacaaaggccgtggccagcatcctgaaacaggtgctgcctagcgccgaaatcatctacgtgaaggcccctaccgtgtctcagttccggcaggatttcaagttcgtgaaagtgcgcgagatgaacgacctgcaccacgccaaagacgcctacctgaacatcgtcgtgggcaacgtgtacttcgtgaagtttaccaagaacgccagctggttcatcaaagagcaccccggcagaagctacaacctgaagaggctgttcctggccgacagagtggaaagaaatggcgaaattgcctgggtggccggcgagagcggaacaatcggaaaagtgaagcggaccatggaaaagaacaacatcctggtcacccggcggagctatgaagtgacaggtggcctgtttgatcagcagctgatgaagaaaggcaaaggacaggtgcccgtgaagggctctgacgagagactgagagatctgcagaagtatggcggctacaacaaagagtctggcgcctacttcgtgctggtggaaagcgaggacaaaaaaggcagaaagatccgcaccatcgagtacatccccatcagactgaagtccaagatgaagcaggatgaggaactctactgctacctcgaggaacagcggggcctgaagaatcccaaggtgctgctgaacaaaatcaagaccgacacactgttccaggtggacggcttttacatgtggctgtccggcagaaccgagaacagactgatcttcaagggcgccaatcagctcctgctgcctccaaagaacgtggaaacactgaagaaagtgctgaagttcgtcgcccggaagaaagagaacaaagagctgaagattttcagcgccgaccggatcgagaaagagatgctgctggacctctacgacacctttctgagcaagctgcagaaaaccgtgtacggcaagcggctgggagcccaagaaaagaccctgtccgacaagcgggataccttcagggacctcgagattgaggaacagtgcatcgtgctgtctgagatcctgcacatgttccagtgtcagagcggcgccagcaatctgaagctgatcggaggacctgagaacgccggcagcctgaaaatcaacaacgacatcaccaagtgccggcagatcaacatcatcaatcagagccccaccggcatctacgagcaagtgattgacctgcagaaggtgtag

SEQ ID NO: 111 - DNA, 4047 bp, Artificial Sequence
  Synthetic sequence or sequence of unknown origin
atgtctatcaagagcgactacttcctgggcctcgacatcggcacagattctatcggatgggccgtgacagaccccgagtaccacatcctgagaagaaagggcaaagccctgtggggcatcagactgttcgatgccgccaatactgccgccgagagaagaaccttccggaccagcagaagaagaatccagcggcggagacagcggatcagactgctgcaagagctgttcgccgaggaaatggttaagctggaccccggcttcttccagagactgagcgatagcgccttctggcaagaggacaagcaagagcagcagatctacagcctgtttacctgcgagaactacaccgacgtggactactacagagagtaccccaccatctaccacctgagaagcgccctgatccaagagaaaaaagagttcgacctgcggctgctgtatctggccctgcaccatctgatgaagcaccggggccactttctgttcaacggcagcatcaacaacgtgaccagcttccacaccaccttccagaccttcgccgactgcctgtacgacgagttcgacatcgagctggaatgcgacagcgaggacagattcgccgagatcctgaaggataagcacgccagaaagaccggcaagtgctctgagctggaaatcatctgccacatcgagaagtccaacaagcagctgaaagaactgttcaagctgatcaccggcatgaaggccagcctgagcgtggtgtttggagatgatgagctggccgagatcgagcacaacaagatcagcttcagcgagagcagctacgacgaagtgcggctggccctggaagatgagattcaagagagaaccggcatcctggacatcttccacgccgtgtattcttgggccatcctggccgatattctggaaggcggcgagtacgagggcaacagctatctgtctgtggccaaggtgtccacctacaagaagcacggcgacgacctgagactgctgagaacactcgtgcgcgagtactgccccgaccactacaagagctttttcagcgtgtccggcaaggacaactactgcgcctatgccggcacactgaagaagaacggcaagaagcagcccatcaagcggtgcagccaagaggacttctacaaggccctgaagaaactgctgaaccagatgcctaccgaccagcctgaagtgaaggatatcttcatcgagattgagaacggcaccttcctgcctctgcaagtgtccaaggacaatggcgtgatcccctaccaagtgaacaagatggaactcgagaagatcctgcagaacgccgaagagtacctgcctttcctgaagaacatcgacgaggaatgcggcaagaccgtgtccaagaagatcatcgacctgttcgagttcagaatcccctactacgtgggccctctgaataccgccaagggcgagaattgctggatggttcgaaaagaggccggcagaatctacccctggaacttcgatgagaaggtggacagagatcagagcgccgagaagttcatcagacggatgaccaaccagtgcacctacctgatccacgaggacgtggtgcctaagaacagcctgctgtactccgagttcatggtgctgaacgagctgaacaatgtgaagattcggagcgagaagctgcccgtggaactgaagcaggccatcgtgctggacctgtttaagaagcagaagcagatcacagggaagaagctgctcaactacctgaacgccaacggctacgacgtgaagaaagaggacctgagcggcttcgacggcaacttcaaagccagcctgtccagctacctgactctgaagaaggtgttcggagaggaactggacaagtacagcgtgcagcagatggccgaggacatcatcctgtggatcaccctgtatggcgacgatcagaaaatgctgcggagagtgatccggaagcactacgagcagcagctgtctgaggaacagatcctgagcctgagcaagctgaagttccaaggctggggcagactgagcagacggttcctgtctgaaatggaaggcgtggactgcgagacaggcgagtgcatgacagtgatgcagggcctgagaaacacccagaacaacctgatgcagctgctgagccagcagttcaccttcatggaactgatcgaggaagagaacgggaactactacgtcgacgagatcacctacgacaacctggtcaaggacatggtcatcagccctagcgtgaaaagggccgtgtggcagacagtgcagatcgtggaagaaatcaagggcgtgatgggatgccagcctaagaaaatcttcgtggaaatggcccgcagcgacgaagagaagaaacggaccgtgtctagaaaggaccggctgctggaagcctacgacgccattaaggatgaggcccggcagtggcaagaagaactgcagaaatactccgacggcgatttcaaggccatcaagctgtacctgtactacacccagatgggccagtgcatgtacaccggcagaaaaatcgatctgtcccagctgaacgacgccaccgtgtgggatagagatcacatctaccctcagagcaagaccaaggacgacagcctggacaatctggtgctggtggatagatccgtgaatgccaagaaaagcgacggcatgctgagccccgagatccagcagagaatgagagccacctggaagtacctgaaagaaaagaagctcatcagcgagaagaagtacgagcggctgaccagagtgtcccctctgacagatgaagaactggccggcttcatcaaccggcagctggtggaaacaagacagagcagcaaagccgtggccacactgctgaagagggtgtacgatgaggccgagattgtgtatgtgaaggccgaggccgtgtctaacttccggcgggataacctggactacatcaaagtgcgggacctgaacgactaccaccacgccaaggacgcctaccagaacatcatcgtgggcaacgtgttccacgagaagtttaccagcaatcccctgcggtggctgaaaaacaaccccaacaccaagtactccctcaaccagatgttcaacttcgacctggaaaagaacggcgtggtcatctggaagagaggcaaggacggctccattaagtgtgtggaagagacactgaagcggaacgacatcctgttcaccagatacgctttctgcaacaaaggcggattcttccaccagatgctgaccgccgctccagaggataagacaaaggccaaaggcctggtgcctatcaagaaaggcatggaaacctggaaatacggcggctacaccagcgtgacccctagccactttatgctggtggccagcaaggataagaagggaaaagagatccggaccatcgagacagtgcccctgtaccggtggaaagagttcaaagagaatcccgacgctctgctccagtactgcagagagttctacggcctgaaagagcccaaggttctgatcccttgcatcaagaagaatgcccggctggtcgtgaacggcttccctatgcacctgaagggctctacaggcaggcagctgattctgcagggtgctgtgcagctgtgcctggataacgagaacatcaagtacctcaagaaagtgacgaagtacctcgagtgcaacgcccagcggagagacaagagaaccctgctcgaagttcgggaagtgaccggaatcaacaaagaggaaaacatccagctgtacgatgtgttcgtggacaagctgagcaacacaatctaccagtacagacccgccaatcctaaggacgtgctgatcaaaggcaaagacaagttcgtcgagctgaatctggccgagcagtgtgtggtgctgggagaagtgctgcatctgttccagtgcaaactgatcggcgccaacctgatcctgatcggagcctctcagcacacaggcatgatcaccaacggcaaaaagatctccaactgcatcagcatcaaactgagcagccagagcgtgacaggcatcaaagaacgcgtgatcgacctgctcaacatctga

SEQ ID NO: 112 - DNA, 4059 bp, Artificial Sequence
  Synthetic sequence or sequence of unknown origin
atgtactacatgggcctcgatctgggcacatcttctgttggctgggccctgaccgacgagaactacaagattgtgcggcggaagggcaaagacatctggggcgtcagactgttcgatgaggccaagaccgccagcgacagacggacctacagaatctctagacggcggagagccagagaggtggccagaattggcgtgctgaaagagtacttcagcgaggccatcgaggaagccgatcctggcttctaccagcggctggaagagtccaagtaccacgacgccgataagagagtgacaggcagggacgccctgttccacgatgccgacttcaccgacagagactacttcgccaagtatcccacaatcgcccatctgcagaaagagctgatctgcagccgcgagaaacaggacgtgcgactggtgtatctggccgtgctgaacctgttcaagcaccggggacactttctgaatggcggactgggagaagtggccgccgatgccgttagcctgtacagcgacttcagacggatcagcagcgacgagttcgacatcatctaccccgaggaataccaggtgcaagagatcgagcaagtgatcaacaaccgggccatcagcaagagagagagggccgaaagactggccggctgttggaagatcgccccttctaaggataagcgggcctacgagatcgtgaagatgctgtgtggactgagcggcagactggccaacatcttcgagaaagacatgctggccggcgacaccggcaaactgcagctgagcttcagggacgctaagtacgaggaaaagttcgacgagatcgccgagtgcggcagccctcaagtgatggatctgatcgcctctgccaagaagctgcacgacagctggatgctgaatgagatcatgaagggccagacctacctgtgctttgccagagtggccagctacgagaagcacagggacgacctgcggaagctgaaagaagtgctgaagaagtacgcccctgaagagtacgagtactgctttcggaagatggaaaacgacaactacagcggctacatcggcagcgtgaactgcaagaaagtgaagcagcggcggaacagagaagccagcagcgagggcttcttcaagtacctgagaaaggtgctgaccgacatgcccgagaacgacgatgtgcagtacctgctgcacgagctggaaaatgagagcctgctgcctagacagctgaccgccgataacggcgtgatccctaatcaggtgcacacagccgagctgaaggccatcctgaagaacgcccaagagtacctgcctttcctgaagatgcaggacgagacaggcctgaccgtgtccgagagaattgtgcagctgttcagctttcaaatcccctactacgtgggccctctgcacattgacggcagcagggaagccaacaaatgggtcgtgcggaaagaacccggcaaggtgtacccttggaatctgtcccagaaggtggacctgcagcagaccagagaagagttcatcctgagaatggtccgacggtgcacctacatggctggcgagaatgccctgcctaagggcagcctgctgtacgagaagttcatggtgctgaacgaactgaacgtgctgcggatcaacggcgagagaatcagcgtgcaggacaagcagaacatctacaacctgtacttccgcaagggcaagaaggtgtcccggaagaagatcctgagctacttccagagccagggcgtgatcggaacatctgaggctgatgtgctgacaggcgtggaagatagcttcacctgtagcctgaccagctacggccggtttagagatgtcgtgggagatgccatcgacacctgggattatcagcagatggccgagcagatcatcttctggggcacagtgtacagcggcgaccggaatctgctcatggaactgatcaccgagaagtacggcagcgagaacaaatacgccgacttctgcaagaccagatccgagggcatctgcctgaccaaagagcagattaagcggatcgccggcttcaagtggcaggattggggcagactgagcagacagtttctggaactggaaggctgcgagaaggctactggggatgtgcggacaattgtgtctgccctgtgggagacaaaccacaacctgatggaactgctgtccgatgagtacacctacagagatgccctggccgagaaggccgagacaaaagagaagctgctgacagagatcagccacgaggacctcgaagagtactactttagcgcccctgtgaagcggatgatctggcagaccatgctgatcctgaaagaaatccggggcgtgatgggcgagaaccccgccagaattttcgtggaaatgccccggacagatggcgagagaggacagagaaccgtcagcagaaagaagaagttcgaggaactgtacaagcagtgccggaaagaggaaagaagctggcaagaggaaatcagccggtactccgagggcgagttccggtctaagaagctgtacctgtactacctccagaaaggccggtgcatgtactctggcgagcctatcgccatggaagatctgttcaacgacaacctctacgacatcgaccacatctaccctcggcacttcgtgaaggacgacagcctggacaacaacctggtgctggtcaagaagcagatcaacgcccacaagagcgacagctaccctctggaaagagagatccaggaccggcagagagtgctttggaaagctctgctggaaggcggcttcctgagcaaagagaaatacggccggctgaccagaacctgggagttctctgatgaggaactggccggattcatcaaccggcagatcgtggaaaccggccaggccacaaaagccgtggctcatctgcttgaagaactgctgcctggcaccgaggtggtgtatgtgaaggccggcaacgtgtccgacttccggcaccagttcaacatgctgaaagccagaagcgtgaacgacttccaccacgccagggatgcctacctgaatatcgtcgtgggcaacacctaccacaccagattcacccggaatcctctgctgttcatccagcagaacggcaagggcagatcctaccacatggacaaggtgttcgccttcgacgtgcggagaaatggcgaaacagcttggacagccggcaaccagggctctatcgtgatggtccgaaagatgatgggcagaaacacccctctcgtgaccagacgggtttacgaggttcacggcggaatcgccaagcagacaatctgtagcgccagagaagctaagaccgagggctacatccccatcaaaggcaaggatgagcggctggccgacagaactaagtacggcggctatggaaatgtgaccggcgcctactacttcctggtggaacacacccgcaagaaaaagagagtgcggaccctggaagtggtgcccctgtatctgaaagagcgcctgaagggcattgagcagctggaagcctattgcgagtgccagctggaactgaagcagcccaagatcgtgctgagcaagatccggttcaagaccctgatctgtcggaacggcatgttcctgaggatcagcggcagaaccggcagctacatcaccgtggataatgccgttcagctgtgtctcggcggctcctgggagaattacatccggcacctggaaaacttcaaaggcgccggaaaagagtatgacagccggggcatcgtgacctgccaggccaatatggaactgtatgacatcctgctgagaaagcacacccagagcatctacagagagcggcccaactctatcgcccagaaaatgaccggcggcagagaaaagtttgagtccctgggaattgccgagcaggctggcgctctgattgagctgctgaagggaacccagtgcgccaacctgagcatcgatgataaggccaccggcatcaagagcagctttatgaaggtcaacaacgacgtgaccagggccgagactttcctgctgatctacgaaagcgtgaccggcatctacaccagagaaatggatctgcagaccctgtga

SEQ ID NO: 113 - DNA, 4395 bp, Artificial Sequence
  Synthetic sequence or sequence of unknown origin
atgaagaagtactttctgggcctcgacgtgggcaccgagaatatcggatacgccctgaccaaggactacgaagtgatgcaagtgaacggcaagcggaccatgggcgtgctgagctttgattctgccaacaccgccgtggacagacggacctatagagccaccagaagaaggctggaccggcggagatatagaatcgccctgctgcaagagctgttcaacgacgagatcatggccaacgacaagaacttcctgcggagactgggcgacaacgacctgtacctggtggacagaaacgtggaaggcaagtacagcctgttcaatgacaccgacttcaacgacatcgtgtactacaagcagtaccccaccatctaccacctgagggaaaagctgatgatggaaggcaccgacgacatccggctgctgtatctggccatccaccacatcatcaagtaccggggacatttcctgctggccggcgaggtgtccacaaatgaagttggcggagtgaagcagctcgaggaactgatcaacaagctgaactccaagctggacgagaacaacgatgagaacaagaacaatgacaatacctgcttcttcgacaagttcgccaccaccgctctgagcgacgtgaaggatctgatctgtggcaccggcgatatcaccaagaacatgctgaaccagatcaccatcggcaagaagtacatcagcaagcgggacaagaagaacaagctcaacgagctgttcggcgtgtccagcagcaagaccagcaagaaaatcatcgacatcgtcatgggcggcaaagtgaacctgaccgagctgtttggcaaagagtactacgagaaagaggaagtcaagggcttcaccatggccgaggaatgggagagcattgaggacctgcagctgatcaaggacaacatcctgcacatcgacattatcgacaccatcaagcagatctacgactgggtcaccctgaacgagatgctgaagggcaagcagagcctgagcagcgccatggtggaaatctacgagacacacaagcaggacctccacgacctgaaagagttcatcaaggattacgcccctaacgactacgagagagtgttcggcgagatcaagaacgagaagggaaagatcgacaacagcatctgcaactacagctgctacatcggcggaggcagatacaacggcgacaagatcggcgccaatggcagatacggctccacatgcacccaagaggacttctacaagtttatcaaaaagatcatcgagagcgtgaccgtggaagaggccaccgcactgagagatgacctgctggaaagaatcgccaacaaggacttcatgcccaagatcgtgtccaagaacaacagcacaatcccctaccagctgaacatgatggaactggacggcatcctggacaaggccagacagaaccccaagttcaccttcctgaacgacgtggacaacggctggacaatcgccgataagatcaagagcctgctgtccttcagagtgccctactacgtgggccccgtgaaagagtacgaggacaacgacaacaacaagagatacgcctgggccgtgcggaaagagagcggaagaatcaccccttggaacttcgacgacaagattgacaagaagcagagcaacgagatcttcatcagacggatgaccaaccggtgcacctacctgaagctggccgacacactgcccaagaacagcatcctgttcagcaagttcatgtgcctgaatgagatcaacagcatgaagatcaatggcgacgccatctcctgcaaagagaagaaagccatcttcgataacgtgttctgcaagaagaatcccacaatcaagaacatcaagaagtatctgatcgagaacttcggctatgagaagggcatcgtgctgtccggcatcgacaacgagattaagtcctccatgaagacctacatcatctacaaaaacaagctgggcaacaaggtggacgctgaccccaacatgatcgagcggatcatcttcctgagcaccatccacgaggacagccagatgctggaaaagagcatccgggaagagttcggcgataagctgaccgaggacgaaatcaaggccatcaagggattcaagttcaatggctggggcagcctgagcgccgagtttctgaccggctataagaacaacggcatcaagctgatgttcgacggcgaaatgctggacatcatcgatattatgtacgagtacaacctgaatctgcagcagatcatctttaacgagaagtgcaacttcagcgaggccctggaagcctacgacctggaacacaacatcgtggaagatagcaacgtgtcctacaacaaggatatcgctgactacccttgcagccccagcgtgaagaaatgcgtgtggcagagcttcaagctcgtgaaggacatcgtgaagcagacaaagatcgtgcccgacgtggtgttcatcgagtcctgccgggaaaacaacgactttaagaagaaccagcggacctccaagcggcgggacatgatcgtggccaattacgatgaggcccggaagatcatcaatgagctgcagagagacaagaaggccgagttcagcatccaagagctggaaggcctgagcgaggacatcgactactgccagaaaaccctggacaactactccgacagcgagctgaagaaagagaacctctacctgtacttcatgcagctcggcaaggacatgtacaccggaaaggccatcgacctgaaccaggtcctgttcggcaatatgtacgaccacgatcacatcatccctcaggccgtgattaaggacgacagcttcaccaatctggtgctggtggccaagaaagaaaacgccgagaagtcccggacataccctctggaaagccagttcagacagaccacactgtggaagaagctgtataagatcggcctgctgagcaatgagaagtacagcagactgatccggcagacccctatcaccgacgaggaacaagagaagttcattaaccggcagctggtggaaaccagccagacagtggttctgctgcgggacctgctgaatcggtacttcgcctccaagaatgtggaagtggtgctgacaaaggccggcaatgtgtccatgttcagaaaagagttcgacctcaccaagagccgggaagtgaatgacttccatcacgcctgggacgcctatctgaacatcatcgtgggcaacatcctcaacaaagagtttaaccacaactggttcatccggcaggataacggcaaggataagagctacaacttcctgagagtgctgcggaagcaggccacagccaacaacaacgaaatcctgaatatcatcgaaaccaccatgaacaacatcgacttccagatggtcaagctccccgaggaaaagaagggcaatttctacagcgaggtgctcaagacccacgagaacgacaaggacagctctctgatccccatgtgcgacaacaagatcgtcggcggaaaagaaattcaccccaagtgcgataccaccaaatacggcggctacaagaccgccaataccgcctactttatcctggccgactccatcgacaagaaaggcgccgtgcagcggaacattgtggccatcagcatcttcgacgatgcccggatcaagaatggcaagatcacctacaaagagatctttgagcgcatcggcctgaaggacggcaagctggctaatgtcgagggaatgaaggtgcccatcattaagaccggcagcctgctggatttcggcgcctattgtctgaggctggccggaatgaccggcaacagactgaccttccacaacgccaatcagctgtttgtgtccaaggaccagaaccggtacatcaaagaactgggaatcctggtcgacaaggtggtcaaagagtccaagaaggacaccaaagaggataagaaagaagctatggccctcgagatcattgaagagagcatcaggcggaagaacaaccccgataacaagaactccaacatcattgtcgtgaaccggaaggacaacctcaagctgtacgacttcttcgtgtacaagctgtctcacaacccctacaaggacatccccacctactcttctctgctggatattctgcagcggggaaaagaggatttcgagcagaaagaaatctatgcccaggtgctgctcctgttcaacattatcaaggcctttcagtgcaacgcccaaaaagtggatgtgtctgccctgtcctacgtgaacaagaaggggatcgccacaaaaggcggagccggacagtgctctatcgccatcaatagcgacatcaccgaaatcgacaagctgatcctgatcaaccagagcatgagcggactgaaagagcagagaatccagctcaacctgaaaaaggtggacaagtga

SEQ ID NO: 114 - DNA, 4029 bp, Artificial Sequence
  Synthetic sequence or sequence of unknown origin
atgtactacatgggcctcgatctgggcacatcttctgttggctgggccctgaccgacgaggattatcacattgtgcggcggaagggcaaagacatctggggcgtcagactgttcgatgaggccagaacagccgtggacagacggaccaacagaatctctcggagaaggcgggccagagagatcgccagaatcggcatgctgaaagagttcttttgcgaggccatcggcgaggtggaccctggcttttatcagcggctggaagagtccaagtaccacgacatggacaagcggatcgaaggcaaggacgccgtgttccacgatgtgggcttcagcgacaaggactactacagcaagtaccccacaatcgcccatctgcagaaagagctgatctgcagcgaagagaagcacgacgtgcggctggtgtacctggccatcctgaacctgtttaagcaccggggccactttctgaacgccggacttggagatgtgggcgccgatatcctgacactgtacagcgagtttcagcggatcgccgccgatgagtttggcatcagcttccccatccagtaccagaagcagaacatcgagaaactgatggacaaccggaccatcagcaagaaagagagagccgaacagctggccgtgctgtggaaagtgatccccgccaagaacaagcaagagtacgagatcatcaagatgctgtgcggcctgagcggcaagatggccaacgtgttccagaaagacatgctggccggcgagacaggcaagatccaggtgtccttcagggacgccaagttcgaggaaaagttcggcgagctgagcgagtgcggctacagccagatgacagatctgattgaggccgccaagagactgcacgactgctggctgctgaatgagatcatgaagggccagccttacctgtgctttgccagagtggccagctacgagaagcacaaggacgacctgaagatcctgaagaaggtgctgcagaagcacgcccctgaggaatacgagtactgcttccggaccatggaaaacgacaactacagcggctacgtgggcagcgtgaactgcaagaaacagaaagtgcggagaaaccggaaggcctctcctgaagagtttttcaagtacctgcgcaaggtgctgaagtctatccctggcgacgaggacacacagtacctgctgcacgagctggaaaatgagagcctgctgcctaagcagctgaccgccgataacggcgtgatccctaatcaggtgcacacagccgagctgaaggccattctgggcaacgcccagaagtatctgcccttcctgcagcagaaggacgaaaccggactgaccgtgtccgagaagatcgtgcagctgttcagctttcaaatcccctactacgtgggacccctgtacatcaatggcggcgacgagacaaacaaatgggtcgtgcggagagaagatggcaaggtgtacccctggaatctgaagcagaaggtggacctgcagcggacccgggaagagttcatcatgagaatggtccgacactgcacctacctgaccggcgaatctgccctgcctaagggctctctgctgtacgagaagtacatggtgctgaacgaactgaacgtgctgcggatcaacggcgagcggatcagcgtggaagataagcagaatatctacaacctgttcttcgtgaagggcaagaaggtgtcccggaagaagattctgagctacttccagagccagggcgtgatcggcgagcaagaggaagatctgctgaccggcatggaagagagcagcatctgcgccctgaccagctacggcagattcagaaatgttgtgggcgacgccatcgacagctgggagtaccagagaatggccgaggaaatcatcttctggggcaccgtgtacagcggcgacagaaagctgatgaccgagctgatcacagagaagtacggccccgagagcaacatggcctatctgaccatcgagcagatcaagaggatctccggcttcaagtggcaggactggggtagactgagccggcagtttcttgagctggaaggctgtgaaaaggccaccggcgaagtgcggacagtgatttctgccctgtgggagacaagcagcaacctgatggaactgctgagcgaccggtacacatacctggacagactggcccagaaaaccgagaaagccgacaagctgctggaagaagtccgctacgacgacctggaaggatactgctttagcgcccctgtgaagcggatggtctggcagaccctgctgattatgaaggaagtgacccaagtgatgggcgagaaccctggccggatcttcgtggaaatgcctagagccgatggcgagaaaggcagaagaacagccagccggaagcggaagtttgaggaactgtacaagcagtgcaagaaggacggccacgactggcagaaagaaatcagccagagaagcgagggcgagttcagaagcaagaagctgtacctgtactacctccagaaaggccggtgcatgtacaccggcgagcccatttctctcgaggacctgttcaacgacaacctgtacgacatcgaccacatctaccctcggcactttgtgaaggacgacagcctggacaacaacctggtgctcgtgcggaagcagattaacgcccacaagagcgacagcttcccactggaaaaagagatccagagaaagcagcacaccctctggaaaagcctgctggatgccggcttcctgagcaaagagaaatacggcagactgacccggacctgggagttctctgatgaagaactggccggcttcatcaaccggcagatcgtggaaacaggccaggccacaaaagctgtggcccacttgttggaagaactgctgcctgacaccgaggtggtgtatgtgaaggccggcaatgtgtccgagttccggcacagattcgatatgctgaaaagccgctccgtgaacgacttccaccacgccaaggatgcctacctgaacatcgtcgtgggcaacacctactactccaagttcacccggaatcctctgtggttcatccagaagaacggcaagagcagaccctaccacatggataagatcttcgagtacgacgtgcagcgcgacggcaaatgtgcttggacagccggcaatcagggcagcatcgtgctggtcaagaaaatgatgggcagaaacacccctctcgtgaccagacgggtgtacgagatgcatggcggaatcgccgagcagaccatctactctgccagagaggctaagcccggcagctacatcccagtgaagtccaaggatgagcggctggccgacgtgatgaagtatggcggctattctagcgtgaccgggacctactatttcctggtggaacacatccgcaagaagaaaaaagtccggacactggaagccgtgcctctgtacctgaaggataagctgaacggaatcgagcagctcacaatctactgcgagtgcgagctgggactcgaggaacccagaatcatcctgcctcggatcagattcaagaccctgatcaagcgcaatggcatgctgctgagaatcagcggcaggaccggcaagagaatcatggtggacaatgccgtccagctgtgcctgggcatccactgggagaactacatcaggcacctggaaaattacctggtgtccggcaaagagagcgacaacagaggcatcgtgaccggcaaaaagaacatggaactgtatgacatcctgctgaagaaacacacccagaccgtgtaccggaacagacccaattccgtggctcagaaaatggcagatgccaaggacagattcgtcggcctgggaatgacagaacaggctggcgccctcattgagctgctgaaagccacacagtgctccaacctgacaatcgacgacaaggccacaggcatcaaggcaagccccatgaagatcaacaacgagatcaccagcgccgagagcttttgcctgatctacgagagcgtgacaggcatctacaccaaagaaatggatctgcaggccctgtga

SEQ ID NO: 115 - DNA, 3279 bp, Artificial Sequence
  Synthetic sequence or sequence of unknown origin
atggcctatggcatcggcctggatatcggaatcgcctctgtgggatatgccgtggtggccctggataccgatgagaacccttggggcatcatcagaatgggcagcagaatcttcgacgccgccgagaatcctaaggatggcgcttctctggccctgcctagaagagaggccagaagcacaagaagaaggctgcggcggcaccggcacagaatcgagagaatcaagaacctgttcctgcggagcggcctgctgacaggcacagatctggattgtctgtaccagggccagctggaagatatctacgccctgagagtgaaggccctggacgagcctgtgggaaagaaagagctggccagaatcctgctgcatctggcccagagaagaggcttcaagagcaaccggaaggccgagagcaaagagaaagaggccggactgctgaaggccgccgtgtccgagaatgagaagagaatggccgagaaccactaccggacagccggcgagatgttcctgaaagatcctgccttcagccagtacaagcggaacaaaggcggcgtgtacctgaccaccgtgcagagatctatgatcgccgaggaagccgacatcatcctgcagagacagagcgagctgggcaacaagatcatcacccgggacttcaaagaggaatacttcagcatcctgctgagccagcggcagtttgatgaaggacctggcggcaatagcccctacggcggaaatcagatcgagaagatgatcggcatctgcaccttcgaggacggcaccaatggattccctgccgaacctagagccgccaaggcctgctacagcttcgagtacttcaacctgctgcagaaagtgaaccacatccggctgctgtacaagaacgagagcagattcctggacgacggacagcggaagaaagtgatcgaactggccaagaccaaggccgacctgaactacagccacatcagaaaagaactcggcctgggcgaagagatcaagttcaacatgctggtgtacaacgccgacgacatcgagaaaaagacgaagttcaacttcatgcccgcctaccaccaagtgaagaaagccctgaatgccgtggccaagggccacatcgagagctactctacagagctgctggacgagatcggccgcatcctgtctacctataagggcgacgagaagcggaccgaggaactgatcaaggccggaatcgctatccccgatgtggacgagctgctgaagatcggcggcctgtctaagtttggccacctgagcctgaaggctctgcggaagatcatcccatttctggaacagggcatgagctacgataaggcctgtgaagccgccggatacaacttcagagcccacaacaaagaaaagagcatgtacctgcctgccaaggctgaggaactgcaggacatcacaaaccccgttgtgcggagagccgtggctcagaccattaaggtggtcaacgccatcattagagagcagggcgagagccccatctacgtgaacattgagctggctagagagatggccaaggatttcaaagagcgggccaagctgaccaaagagaaccacgagaaccaggccgaaaacgagcggctgctggatagaatccggaaagagttcggcaagagcaatcccaccggcatggacctggttaagctgaagctgtggaaagagcaggacggcatcagcccctacagcagaaagaccatcgaagtgaccagactgttcgagcccggctatgtggacgtggaccacatcgtgccttacagcatcagcttcgacgacacctacaagaacaaggtgctggtcatgagcagcgagaacagagagaagggcaacaaactgcccatccagtacctggccgccaagtttggaaaagacgccgtggaagccttcaaagtgtgggtcgtgaacagcgtgaagaactaccccaagcggcagaaactgctgaaagagaagatcaccgaagaggatatcaccggctttaaagagcggaacctgcaggataccaagtacatggcccgggtgctgtataacttcatcaacgacagactgctgttcgccgagtctgagatcggcaagaagaagagagtcagagccgtcaacggcgccatcaccagctacctgagaaagagatggggaatcaacaaagtccgcgagaacggcgataagcaccatgccgtggatgccctcgtgatcgcctgtaccaccgacaagatgatccaagagatcagcggctacgccagaggccaagagctggaatacgagcccatggacaaagaaagcctgctggtggataagagcaccggcctgatcctgaagcggttcccctatccttgggaagattttcggaaagaactgatggcccggatgagcgatcagcctgccgaagctctgcaaaagctgcgcctgctgtactaccaggacaaggacattaccgccatcaagcccatcttcgtgtcccggatgcctcggcacaaagtgacaggtgccgctcacaaggctacagtgaaaggcgccagacacctggatgaggggatcgccctgtataagaccgacctcgtgaacctgaagctggacaagaacacaggcgagatcgtggactactacaaccccgagagcgacaggctgctctacaacgccctgaaaacccagctgcagaagtataacggcgacggcaaaaaggccttcgccgagcctttttacaagcctaaggccgatggcacccctggacctctggtcaaaaaagtgaagtgcttcgagaaaacgaccctgaacgtgctggttgaggatggcacaggcgccgctgacaacgattctatggttcgagtggacgtgttcaaggtggaaggcgacggctactacctggtgcctatctacgtggccgacacactgaaagaaaccctgcctaacaaggccatcgtggcccacaagcagtacagccagtggaaagaaatgaaggaagaggacttcctgttcagtctgtaccccaacgacctgatccgggtgcagaacaagaaagacatggtgttcaccaagagccagaaagagagcaacctgcctgagaactatatcgccaaggacatcattgcctactacaagcagaccgacatcagcgctggcgccattaagatcatctccaacgacgacagctactctctgagaggcctgggagtgaaaaccctgcagcgcatcgagaagtaccaggtggacgtgctgggcagctactacaaagtcaagaccgagaagagacagctgttccactga

SEQ ID NO: 116 - DNA, 3639 bp, Artificial Sequence
  Synthetic sequence or sequence of unknown origin
atgagcaagatcctgggcctcgatgttggcatcggatctctcggatgggccatcatcgacgaggatgccagacggattgtggacctgggcgtcagaatcttcgagtctggcgaagagggcgccacagatgctgctggcagagcctctcagatcaggcggagctacagaagcaccaagcggctgaacaagcggcggaagcaccggaacatccggctgaagtccttcatcgaggaactgaacatcatcagcgtcgaggacatcaactgcagctacaagaccaagggcttcaaccccgacacctggcggtatagaagcgagggcatcagcagaaagctgagccctattgagctggcctccgtgctgatcaacctgagcaactaccggggctacagagacttctacgaggacgacgaggaagatagcggaaagctggccgtggccaagaaccggatcaacaccatctacgaagagaagaaggaccagtaccggaccatcggccagatgatctacaacgagccctgcttcagggacgagagaaacggcaagctggtcatccggaacagagccatcagaggcaccgacggcaagaaagaaacaaactacgtgtacctgatcaatcggagcaccctgatcgacgagctgaaggtgctgctgagctgccagagagagtttggctacgagcagctgaccgacgacgccatcgataagatctgcagcatcatcttcgtgcagcgggacttcgaggatggccctggacctaacaaggccgagtctcccgagcggagagaatccatgatgaagtccctgaaaggccaccagagctacagcggctttgacgaactcgtgggcaattgcagcttctaccctaccgaaggcagaggccacaagaacagccagctgtacgatatgtacgtggtcatcaacaccctgagccagctgcggttctactgcgacaacaaagaagtgaactgccccgagagcgtggtcatggaaatcaggctgcagctgttcgagaatggcggcagcctgagcaagaagcacctggaaaaaatctgcaaggaccacaagatcgaagtctcattccccggcgagctgtccaagaagaaagtcatcatcaaggccccgtacatcaagatcctcaccgacgaccacctgttcgacgtggacttcatgcagcagttcaaagaggaaaactactacgacgactgctccctgagcagcaagatcggcctggccattgccaaatacgccacacctcggcggagaaaggacgagatcaagaacaacgtgaccgatgaagagtacaaccggctgggctacgccgacggcctgaaaacaatcaagtctctgggcgtgtccaacgtgtcctttaagtacatgaaggaagccatcagcgcctacctgaacggcattaagtacggcgacttccaggccgacttcattaagaacaatatcgagaatgacgagaagaagttcctgtccaacgacgggaagctgctgcccatcaacgatcccgatatggttcgaaaccccgtggtgtacagaaccatcaatgagacacggaagatcgtgaacgccgtgatgggcctgtacaaggatatcaagaccatcaacattgagatcgcccgcgacatcggcaagagcttcgagcagagaaaagagacagccaagtaccagaaagagaacgagaacagcaacgaagaactgcgggccgagctgctgagaaagctgtactctgagggctacagcgtgatgctgagcgacagactgctggacaagtacaagctgtggaaggatcagaaacacatgtgcatgtacagcggcaaagagatccagtttaaagaaatcgtggccgccgtgaacgtgcagatcgagcacatcgtgcctcagagcatcatcctggacgagacactgaacaacaaggtgctggtgctgaccgaggaaaaccagaagaagaacaacagactgcccctcgagtacatggactctagccaggccaagggattcaagaacagagtgaacaacctgtaccgcaccaacaacatcaaccgcatcaaatacgagtacctcatgctggaaagcctgacagacgacgtgatcagcggcttcgtggacagaaacatcaacgacaccaggaccatcagcaaatacgtgtccaattacctgcggctgagcttcaacggcgacgtgacagtgaatgtgatcaagggcagcgtgaccagcagattccgcagaagatggctgggcaccagaagcaagagatacgacggcgtgccaagcgtgtacggactggaacagaaaacccggaagctgcactactaccaccacgccattgatgccgccgtggtggccaatctgacccggccttatatcgagattgcccaggactacctgcggatcgagagcatcagaaaggatgccgagtaccacgccaagaagggcaacagcaagaccagcctggtgctgtatgacgagctggaaaaagagaaggccaagagcctggacaagatccaccacttctacggcttcaacagagagtacacaagaagcctgctggactccggctttgtgccctccatctgcaaagacttcagaagcgagatcgagatcagagtgcccctggaaatcaccttcgacgccttcggctacacccagatggaaaagtcctaccgcagcctgcggaacaacatggacgccatcaagagcaacctgactgacgccgatatcgaggccggaaccgtgatcgtgcccaatatgctggaagatatcaacagcgacctgcctatcgtgtgccctgaggccgtgtgcatcaagcccaatgctcagatcgtgttcagcgacaaggacttcgaccccaacgccgattccgatgtgatccggaagcagttcgacaagttcaccaagaatctgagccccagggacgtgatggactacatcgaggatatccggatggtcaccgaggacgagtacgccacaagagtgaagaagtactacagcagcgaccccaccttcgccgagagaatcaagctgccctatgtgtccttcaagatcagcaagaaattccggggcaacatggtggccagcgacaaccctatcgctctgaagaaaaccgggttcaacacctacatcgaactcgagaacgacatcaaaaacaacctcaagagcccctactacgtgcggttcaacaagggcatcaacgagagcggcaacttcacaatctacgacgccagaagctactactgcatcgagatctttatcgacgacaagggcacctaccagatccggggcatcagatatgtggacgtggtgcacgacagcaagcggggcaaactgagactgctgaaacctctgcctctgggctacaagcacgtgatgtacctgttcaagaatgagtacatcatctcctacgacaagaaggggaatattaagaacaacggcttcggcgcctaccgcggcgtggaaaacatcaatagaaacaccggcaagatccgcctcttcagcaacatgaacctgagcggcagagacaactccatcaatctggctggcgcctgctccaagattgagatcagcatcctgggacacatcatgggcatgaagaagtgcggcgaccagagcctgttcatcaccgagaagtcctga

SEQ ID NO: 117 - DNA, 3264 bp, Artificial Sequence
  Synthetic sequence or sequence of unknown origin
atgaagtacatcatcggcctggacatgggaatcgccagcgtgggatatgccacactgctgctggatgacaaagagcagccctgcagaatcctgaagatgaacagccggatcttcgaggccgccgagcatcctaaggatggatcttctctggccgctcctcggcggatcaatagaggcatgagaagaaggctgcggcggaggcggttcagaaaagagcagatcagagatctgatcgccgagaagggcatcatgaccaccgaggaaatcgacgagatctacaacagcggcaaagagctgagcgacatctacgagatcagagccgaggctctggatcgcatcctgagcaaagaagagttcgtccggctgatgatccacctgagccagcggagaggcttcaagagcaatagaaaggtggacgccagcgacagcaagagcgagtctggaaaactgctgattgccgtgaagaacaacagagagctgctgagcgagaaaggctaccggacaatcggcgagatgctgtacaaggacgagagattcgccgccaacaagcggaacaaggccgacgactacagcaacacctttagcagggccgagtacgaggatgagatcaaccagatctttgaggcccagctggccctgggcaatccttacgccaccgacgacttcagaaagaagtacctggacatctacctgtctcagcgggcctttgatgatggccctggcggaaaaagcccttacgccggaaaccagatcgagaagatgctgggccactgcaccttcgaggaaaacgagctgagagccgtgaaggccagctacagcttcgagtacttcaacctgctgtccaaagtgaacgccatcaagatcgtcggcgaaggcggcaagagaagcctgacagatgccgagagaaagagcgtgatcgccctggcctttgccaagaatagcgtgacatacgccagcctgcggagagagctgaagctgcctgacggcaagttcttcaacatcagctacggcaagggcgacaagagcgccgaggaagtggaaaaaaagaccaagttcgcctacctgaccgccttccacaccttcaagaaagcctacggccaggcctacgtcggctggtccacagagaagaagaatgccctggcttacgccctgaccgtgtacaagaacgacaacaagatcattgcctacctcaccgaccacaacttcgagaaggccgagatcgagattgccctgacactgcccagcttcaccaagaccggcaatctgtctgtgaaggccctggacaagctgatcccttacctggaacagggcatgctgtataacgaggcctgtagcgccgctggctacaactttaaagccgacgacgccagcaagagaatgttcctgcctgccaatgccaaggacgcccctgagctggaagaactgagaaaccctgttgtgcggagggccgtgtctcagaccatcaaagtgatcaacgccgtgatcagagagtgcggcgagagccccaccttcgtgaatattgagatcgcccgcgagctggccaaggacttcaaggatcggaagcagatcgagcgcgagcagaaagagaatcaagagaagaacgagaagctgatggaacggctgcggaacgagttccacatcctgaagccaaccggccaggacctgatcaagctgaaactgtgggaagaacaggacggcagatgcccctacagccagaagcctatcagcattgagaagctgttcgacgtgggctacaccgacatcgaccacatcatcccttactccatctgcttcgatgacacctacaacaacaaggtgctggtgctgtccgccgagaaccggatgaagggcaatagactgcctatgcagtatctcggcggcaagcggcaggacgatttcagactgtgggtcaacagcgcccacctgagaaagcggaagaaggacaatctgctgagagagtcctacaccgaagaggacaagtccggatggaagaagcggaacctgcaggacacacagtacatggccagcttcatgctgaactacctgaagaagtatctggccctgcagcctagcgaccagggcagaaagaatcagatcatctccgtgaacggcagagccaccgactacctgcgaaaaagatggggcgtgcagaagattagagagaacggcgatacccaccacgccgtggatgccgtgattatcgcttgtgtgacccagggcatgatcaagcggatcagcgagtacgccaagtacaaagaaaccgcctttcagcaccccgagacaaaagaatacttcgatgtggacaagaaaaccggcgaagtcatcaacaggttccctctgccttatcctgacttccggaaagaactggacatccggtgcagcgacgaccccattagactgctgagactgtaccctctggtgcagtacagctccggcgaagaggtcaaacccatgttcgtgtccagaatgcccaaccacaaagtgaagggcgctgcccacatggaaaccatcagaggccacttcaaagaggacggcaaggactactctgtggccaaggtgccactgaccagcctgaagctgaagaatggggagatcgagggctacttcaatcccggcagcgacatgctgctctacaacgcccttaaagccagactggcccagttcggcggagatggcaaaaaggccttcagcgagcccttctacaagcccaaggctgatggatctcagggccctctggtcaagaaagtgaagatcgtgaacaagagcaccctgagcgtgccagtgcatggtggaacagctgtggccgataacggctctatggtccgagtggacgtgttctacgtggaaaacgaaggctactacctggtgcctgtgtacgtgtccgacaccgtgaagagagaactgcccaatagagccatcgtggcccacaaggcctacgaggactggaaagagatggacgagaacaacttcgtgttctctctgtaccccaacgacctcattaagctgaccttcgccaaagagatgagcttcagcctgaccaacaagggctctagcctgcctcctgagatgaagtgcaaagagatcttcgcctactacaagggcaccaatatcgcctctggcaccatcggcgtgatcaaccacgacaatacctacggcatcggcagcctgggcatcaagagactgcctcacatcgagaagtaccaggtggacgtgctgggcaacatcaccaaagtgggcaaagaaaagcggatgcggttccggtga

SEQ ID NO: 118 - RNA, 16 nt, Artificial Sequence
  Synthetic sequence or sequence of unknown origin
guugcagguugaccgg

SEQ ID NO: 119 - RNA, 15 nt, Artificial Sequence
  Synthetic sequence or sequence of unknown origin
guugcagguugaccg

SEQ ID NO: 120 - RNA, 12 nt, Artificial Sequence
  Synthetic sequence or sequence of unknown origin
guugcagguuga

SEQ ID NO: 121 - RNA, 10 nt, Artificial Sequence
  Synthetic sequence or sequence of unknown origin
guugcagguu

SEQ ID NO: 122 - RNA, 17 nt, Artificial Sequence
  Synthetic sequence or sequence of unknown origin
gcggucaaccugcuaac

SEQ ID NO: 123 - RNA, 16 nt, Artificial Sequence
  Synthetic sequence or sequence of unknown origin
cggucaaccugcuaac

SEQ ID NO: 124 - RNA, 13 nt, Artificial Sequence
  Synthetic sequence or sequence of unknown origin
ucaaccugcuaac

SEQ ID NO: 125 - RNA, 11 nt, Artificial Sequence
  Synthetic sequence or sequence of unknown origin
aaccugcuaac

SEQ ID NO: 126 - RNA, 19 nt, Artificial Sequence
  Synthetic sequence or sequence of unknown origin
aaggaaaccuuuaguuucc

SEQ ID NO: 127 - RNA, 17 nt, Artificial Sequence
  Synthetic sequence or sequence of unknown origin
ggaaaccuuuaguuucc

SEQ ID NO: 128 - RNA, 60 nt, Artificial Sequence
  Synthetic sequence or sequence of unknown origin
gcaaaaugcuuuuauauucguugagauuuuugcgugaauauagauagcacacaaugcaaa

SEQ ID NO: 129 - RNA, 30 nt, Artificial Sequence
  Synthetic sequence or sequence of unknown origin
gggaaagcuacggcuuucccccuuuuuuuu

SEQ ID NO: 130 - RNA, 22 nt, Artificial Sequence
  Synthetic sequence or sequence of unknown origin
gggaaagcuacggcuuuccccc

SEQ ID NO: 131 - RNA, 146 nt, Artificial Sequence
  Synthetic sequence or sequence of unknown origin
guugcagguugaccgggaaagcggucaaccugcuaacaaggaaaccuuuaguuuccgcaaaaugcuuuuauauucguugagauuuuugcgugaauauagauagcacacaaugcaaagggaaagcuacggcuuucccccuuuuuuuu

SEQ ID NO: 132 - RNA, 146 nt, Artificial Sequence
  Synthetic sequence or sequence of unknown origin
guugcagguugaccgggaaagcggucaaccugcuaacaaggaaaccuuuaguuuccgcaauaugcuuuaauauucguugagauuauugcgugaauauagauagcacacaaugcaaagggaaagcuacggcuuucccccuuuuuuuu

SEQ ID NO: 133 - RNA, 60 nt, Artificial Sequence
  Synthetic sequence or sequence of unknown origin
gcaauaugcuuuaauauucguugagauuauugcgugaauauagauagcacacaaugcaaa

SEQ ID NO: 134 - RNA, 118 nt, Artificial Sequence
  Synthetic sequence or sequence of unknown origin
guugcagguugaccgggaaagcggucaaccugcuaacaaggaaaccuuuaguuuccgcaauaugcuuuaauauucguugagauuauugcgugaauauagauagcacacaaugcuuuuu

SEQ ID NO: 135 - RNA, 105 nt, Artificial Sequence
  Synthetic sequence or sequence of unknown origin
guugcagguugaccgggaaagcggucaaccugcuaacaaggaaaccuuuaguuuccgcaauaugcuuuaauauucguugagauuauugcgugaauauagauuuuu

SEQ ID NO: 136 - RNA, 19 nt, Artificial Sequence
  Synthetic sequence or sequence of unknown origin
guuguaguccccucguagu

SEQ ID NO: 137 - RNA, 15 nt, Artificial Sequence
  Synthetic sequence or sequence of unknown origin
guuguaguccccucg

SEQ ID NO: 138 - RNA, 12 nt, Artificial Sequence
  Synthetic sequence or sequence of unknown origin
guuguagucccc

SEQ ID NO: 139 - RNA, 10 nt, Artificial Sequence
  Synthetic sequence or sequence of unknown origin
guuguagucc

SEQ ID NO: 140 - RNA, 19 nt, Artificial Sequence
  Synthetic sequence or sequence of unknown origin
acuaucaggucacuacaau

SEQ ID NO: 141 - RNA, 15 nt, Artificial Sequence
  Synthetic sequence or sequence of unknown origin
ucaggucacuacaau

SEQ ID NO: 142 - RNA, 12 nt, Artificial Sequence
  Synthetic sequence or sequence of unknown origin
ggucacuacaau

SEQ ID NO: 143 - RNA, 10 nt, Artificial Sequence
  Synthetic sequence or sequence of unknown origin
ucacuacaau

SEQ ID NO: 144 - RNA, 57 nt, Artificial Sequence
  Synthetic sequence or sequence of unknown origin
aaaguagaacacugaaaagcucugacggcccacuuuccgugggucgucaucuuuuuu

SEQ ID NO: 145 - RNA, 51 nt, Artificial Sequence
  Synthetic sequence or sequence of unknown origin
aaaguagaacacugaaaagcucugacggcccacuuuccgugggucgucauc

SEQ ID NO: 146 - RNA, 99 nt, Artificial Sequence
  Synthetic sequence or sequence of unknown origin
guuguaguccccucguagugaaaacuaucaggucacuacaauaaaguagaacacugaaaagcucugacggcccacuuuccgugggucgucaucuuuuuu

SEQ ID NO: 147 - RNA, 19 nt, Artificial Sequence
  Synthetic sequence or sequence of unknown origin
guuguaguucccugaucgu

SEQ ID NO: 148 - RNA, 15 nt, Artificial Sequence
  Synthetic sequence or sequence of unknown origin
guuguaguucccuga

SEQ ID NO: 149 - RNA, 12 nt, Artificial Sequence
  Synthetic sequence or sequence of unknown origin
guuguaguuccc

SEQ ID NO: 150 - RNA, 10 nt, Artificial Sequence
  Synthetic sequence or sequence of unknown origin
guuguaguuc

SEQ ID NO: 151 - RNA, 19 nt, Artificial Sequence
  Synthetic sequence or sequence of unknown origin
acgaucagguugcuacaau

SEQ ID NO: 152 - RNA, 15 nt, Artificial Sequence
  Synthetic sequence or sequence of unknown origin
ucagguugcuacaau

SEQ ID NO: 153 - RNA, 12 nt, Artificial Sequence
  Synthetic sequence or sequence of unknown origin
gguugcuacaau

SEQ ID NO: 154 - RNA, 10 nt, Artificial Sequence
  Synthetic sequence or sequence of unknown origin
uugcuacaau

SEQ ID NO: 155 - RNA, 13 nt, Artificial Sequence
  Synthetic sequence or sequence of unknown origin
aagguaguacacc

SEQ ID NO: 156 - RNA, 11 nt, Artificial Sequence
  Synthetic sequence or sequence of unknown origin
gguaguacacc

SEQ ID NO: 157 - RNA, 45 nt, Artificial Sequence
  Synthetic sequence or sequence of unknown origin
gaagagcucuaacgccccguuuugcggggcguuaucucuuuuuuu

SEQ ID NO: 158 - RNA, 38 nt, Artificial Sequence
  Synthetic sequence or sequence of unknown origin
gaagagcucuaacgccccguuuugcggggcguuaucuc

SEQ ID NO: 159 - RNA, 100 nt, Artificial Sequence
  Synthetic sequence or sequence of unknown origin
guuguaguucccugaucgugaaaacgaucagguugcuacaauaagguaguacaccgaagagcucuaacgccccguuuugcggggcguuaucucuuuuuuu

SEQ ID NO: 160 - RNA, 100 nt, Artificial Sequence
  Synthetic sequence or sequence of unknown origin
guuguaguucccugaucgugaaaacgaucagguugcuacaauaagguaguacaccgaagagcucuaacgccccguauugcggggcguuaucucuuuuuuu

SEQ ID NO: 161 - RNA, 45 nt, Artificial Sequence
  Synthetic sequence or sequence of unknown origin
gaagagcucuaacgccccguauugcggggcguuaucucuuuuuuu

SEQ ID NO: 162 - RNA, 38 nt, Artificial Sequence
  Synthetic sequence or sequence of unknown origin
gaagagcucuaacgccccguauugcggggcguuaucuc

SEQ ID NO: 163 - RNA, 17 nt, Artificial Sequence
  Synthetic sequence or sequence of unknown origin
guuuuaguacucuguug

SEQ ID NO: 164 - RNA, 15 nt, Artificial Sequence
  Synthetic sequence or sequence of unknown origin
guuuuaguacucugu

SEQ ID NO: 165 - RNA, 12 nt, Artificial Sequence
  Synthetic sequence or sequence of unknown origin
guuuuaguacuc

SEQ ID NO: 166 - RNA, 10 nt, Artificial Sequence
  Synthetic sequence or sequence of unknown origin
guuuuaguac

SEQ ID NO: 167 - RNA, 18 nt, Artificial Sequence
  Synthetic sequence or sequence of unknown origin
caacaauaguucuaagau

SEQ ID NO: 168 - RNA, 16 nt, Artificial Sequence
  Synthetic sequence or sequence of unknown origin
acaauaguucuaagau

SEQ ID NO: 169 - RNA, 12 nt, Artificial Sequence
  Synthetic sequence or sequence of unknown origin
uaguucuaagau

SEQ ID NO: 170 - RNA, 10 nt, Artificial Sequence
  Synthetic sequence or sequence of unknown origin
guucuaagau

SEQ ID NO: 171 - RNA, 24 nt, Artificial Sequence
  Synthetic sequence or sequence of unknown origin
aaggcuauuuaugccguaggguau

SEQ ID NO: 172 - RNA, 13 nt, Artificial Sequence
  Synthetic sequence or sequence of unknown origin
ggcuauuuaugcc

SEQ ID NO: 173 - RNA, 24 nt, Artificial Sequence
  Synthetic sequence or sequence of unknown origin
ggugguaucccuuuaauccaccuu

SEQ ID NO: 174 - RNA, 38 nt, Artificial Sequence
  Synthetic sequence or sequence of unknown origin
uaagccauugcuuaugcaauggcuuaucuauauuuuuu

SEQ ID NO: 175 - RNA, 32 nt, Artificial Sequence
  Synthetic sequence or sequence of unknown origin
uaagccauugcuuaugcaauggcuuaucuaua

SEQ ID NO: 176 - RNA, 125 nt, Artificial Sequence
  Synthetic sequence or sequence of unknown origin
guuuuaguacucuguuggaaacaacaauaguucuaagauaaggcuauuuaugccguaggguauggugguaucccuuuaauccaccuuuaagccauugcuuaugcaauggcuuaucuauauuuuuu

SEQ ID NO: 177 - RNA, 125 nt, Artificial Sequence
  Synthetic sequence or sequence of unknown origin
gucuuaguacucuguuggaaacaacaauaguucuaagauaaggcuauuuaugccguaggguauggugguaucccuuuaauccaccuuuaagccauugcuuaugcaauggcuuaucuauauuuuuu

SEQ ID NO: 178 - RNA, 17 nt, Artificial Sequence
  Synthetic sequence or sequence of unknown origin
gucuuaguacucuguug

SEQ ID NO: 179 - RNA, 15 nt, Artificial Sequence
  Synthetic sequence or sequence of unknown origin
gucuuaguacucugu

SEQ ID NO: 180 - RNA, 12 nt, Artificial Sequence
  Synthetic sequence or sequence of unknown origin
gucuuaguacuc

SEQ ID NO: 181 - RNA, 10 nt, Artificial Sequence
  Synthetic sequence or sequence of unknown origin
gucuuaguac

SEQ ID NO: 182 - RNA, 19 nt, Artificial Sequence
  Synthetic sequence or sequence of unknown origin
guuguagcucccuguuaau

SEQ ID NO: 183 - RNA, 15 nt, Artificial Sequence
  Synthetic sequence or sequence of unknown origin
guuguagcucccugu

SEQ ID NO: 184 - RNA, 12 nt, Artificial Sequence
  Synthetic sequence or sequence of unknown origin
guuguagcuccc

SEQ ID NO: 185 - RNA, 10 nt, Artificial Sequence
  Synthetic sequence or sequence of unknown origin
guuguagcuc

SEQ ID NO: 186 - RNA, 19 nt, Artificial Sequence
  Synthetic sequence or sequence of unknown origin
acuaacagguuacuacaau

SEQ ID NO: 187 - RNA, 15 nt, Artificial Sequence
  Synthetic sequence or sequence of unknown origin
acagguuacuacaau

SEQ ID NO: 188 - RNA, 12 nt, Artificial Sequence
  Synthetic sequence or sequence of unknown origin
gguuacuacaau

SEQ ID NO: 189 - RNA, 10 nt, Artificial Sequence
  Synthetic sequence or sequence of unknown origin
uuacuacaau

SEQ ID NO: 190 - RNA, 16 nt, Artificial Sequence
  Synthetic sequence or sequence of unknown origin
aaggucuuaggaccgc

SEQ ID NO: 191 - RNA, 12 nt, Artificial Sequence
  Synthetic sequence or sequence of unknown origin
ggucuuaggacc

SEQ ID NO: 192 - RNA, 51 nt, Artificial Sequence
  Synthetic sequence or sequence of unknown origin
aaagcucuaucgcccuacauccguagggcgauaucuuuuuauacauuuuuu

SEQ ID NO: 193 - RNA, 45 nt, Artificial Sequence
  Synthetic sequence or sequence of unknown origin
aaagcucuaucgcccuacauccguagggcgauaucuuuuuauaca

SEQ ID NO: 194 - RNA, 109 nt, Artificial Sequence
  Synthetic sequence or sequence of unknown origin
guuguagcucccuguuaaugaaaacuaacagguuacuacaauaaggucuuaggaccgcaaagcucuaucgcccuacauccguagggcgauaucuuuuuauacauuuuuu

SEQ ID NO: 195 - RNA, 109 nt, Artificial Sequence
  Synthetic sequence or sequence of unknown origin
guuguagcucccuguuaaugaaaacuaacagguuacuacaauaaggucuuaggaccgcaaagcucuaucgcccuacauccguagggcgauaucuauuuauacauuuuuu

SEQ ID NO: 196 - RNA, 51 nt, Artificial Sequence
  Synthetic sequence or sequence of unknown origin
aaagcucuaucgcccuacauccguagggcgauaucuauuuauacauuuuuu

SEQ ID NO: 197 - RNA, 45 nt, Artificial Sequence
  Synthetic sequence or sequence of unknown origin
aaagcucuaucgcccuacauccguagggcgauaucuauuuauaca

SEQ ID NO: 198 - RNA, 19 nt, Artificial Sequence
  Synthetic sequence or sequence of unknown origin
auuuuaguaccuggagaaa

SEQ ID NO: 199 - RNA, 15 nt, Artificial Sequence
  Synthetic sequence or sequence of unknown origin
auuuuaguaccugga

SEQ ID NO: 200 - RNA, 12 nt, Artificial Sequence
  Synthetic sequence or sequence of unknown origin
auuuuaguaccu

SEQ ID NO: 201 - RNA, 10 nt, Artificial Sequence
  Synthetic sequence or sequence of unknown origin
auuuuaguac

SEQ ID NO: 202 - RNA, 20 nt, Artificial Sequence
  Synthetic sequence or sequence of unknown origin
uuucuucagaccuacuaaaa

SEQ ID NO: 203 - RNA, 16 nt, Artificial Sequence
  Synthetic sequence or sequence of unknown origin
uucagaccuacuaaaa

SEQ ID NO: 204 - RNA, 13 nt, Artificial Sequence
  Synthetic sequence or sequence of unknown origin
agaccuacuaaaa

SEQ ID NO: 205 - RNA, 10 nt, Artificial Sequence
  Synthetic sequence or sequence of unknown origin
ccuacuaaaa

SEQ ID NO: 206 - RNA, 45 nt, Artificial Sequence
  Synthetic sequence or sequence of unknown origin
caaggcuuuaugccgaaaguuuuuuugauuugaauugaaugaguu

SEQ ID NO: 207 - RNA, 22 nt, Artificial Sequence
  Synthetic sequence or sequence of unknown origin
aaggcuuuaugccgaaaguuuu

SEQ ID NO: 208 - RNA, 33 nt, Artificial Sequence
  Synthetic sequence or sequence of unknown origin
gaaagaggaugccgacggguguccucuuuuuuu

SEQ ID NO: 209 - RNA, 26 nt, Artificial Sequence
  Synthetic sequence or sequence of unknown origin
gaaagaggaugccgacggguguccuc

SEQ ID NO: 210 - RNA, 121 nt, Artificial Sequence
  Synthetic sequence or sequence of unknown origin
auuuuaguaccuggagaaagaaauuucuucagaccuacuaaaacaaggcuuuaugccgaaaguuuuuuugauuugaauugaaugaguugaaagaggaugccgacggguguccucuuuuuuu

SEQ ID NO: 211 - RNA, 121 nt, Artificial Sequence
  Synthetic sequence or sequence of unknown origin
auuuuaguaccuggagaaagaaauuucuucagaccuacuaaaacaaggcuuuaugccgaaaguauuuaugauuugaauugaaugaguugaaagaggaugccgacggguguccucuuuuuuu

SEQ ID NO: 212 - RNA, 45 nt, Artificial Sequence
  Synthetic sequence or sequence of unknown origin
caaggcuuuaugccgaaaguauuuaugauuugaauugaaugaguu

SEQ ID NO: 213 - RNA, 19 nt, Artificial Sequence
  Synthetic sequence or sequence of unknown origin
guuuugcuacccuaaauua

SEQ ID NO: 214 - RNA, 15 nt, Artificial Sequence
  Synthetic sequence or sequence of unknown origin
guuuugcuacccuaa

SEQ ID NO: 215 - RNA, 12 nt, Artificial Sequence
  Synthetic sequence or sequence of unknown origin
guuuugcuaccc

SEQ ID NO: 216 - RNA, 10 nt, Artificial Sequence
  Synthetic sequence or sequence of unknown origin
guuuugcuac

SEQ ID NO: 217 - RNA, 21 nt, Artificial Sequence
  Synthetic sequence or sequence of unknown origin
aauauuaggaccuagcaaaac

SEQ ID NO: 218 - RNA, 17 nt, Artificial Sequence
  Synthetic sequence or sequence of unknown origin
uuaggaccuagcaaaac

SEQ ID NO: 219 - RNA, 14 nt, Artificial Sequence
  Synthetic sequence or sequence of unknown origin
ggaccuagcaaaac

SEQ ID NO: 220 - RNA, 11 nt, Artificial Sequence
  Synthetic sequence or sequence of unknown origin
ccuagcaaaac

SEQ ID NO: 221 - RNA, 13 nt, Artificial Sequence
  Synthetic sequence or sequence of unknown origin
aaggcuuuaugcc

SEQ ID NO: 222 - RNA, 11 nt, Artificial Sequence
  Synthetic sequence or sequence of unknown origin
ggcuuuaugcc

SEQ ID NO: 223 - RNA, 28 nt, Artificial Sequence
  Synthetic sequence or sequence of unknown origin
gaaaucggagucgacgggcuccuuuuuu

SEQ ID NO: 224 - RNA, 22 nt, Artificial Sequence
  Synthetic sequence or sequence of unknown origin
gaaaucggagucgacgggcucc

SEQ ID NO: 225 - RNA, 85 nt, Artificial Sequence
  Synthetic sequence or sequence of unknown origin
guuuugcuacccuaaauuagaaaaauauuaggaccuagcaaaacaaggcuuuaugccgaaaucggagucgacgggcuccuuuuuu

SEQ ID NO: 226 - RNA, 85 nt, Artificial Sequence
  Synthetic sequence or sequence of unknown origin
guauugcuacccuaaauuagaaaaauauuaggaccuagcaauacaaggcuuuaugccgaaaucggagucgacgggcuccuuuuuu

SEQ ID NO: 227 - RNA, 19 nt, Artificial Sequence
  Synthetic sequence or sequence of unknown origin
guauugcuacccuaaauua

SEQ ID NO: 228 - RNA, 15 nt, Artificial Sequence
  Synthetic sequence or sequence of unknown origin
guauugcuacccuaa

SEQ ID NO: 229 - RNA, 12 nt, Artificial Sequence
  Synthetic sequence or sequence of unknown origin
guauugcuaccc

SEQ ID NO: 230 - RNA, 10 nt, Artificial Sequence
  Synthetic sequence or sequence of unknown origin
guauugcuac

SEQ ID NO: 231 - RNA, 21 nt, Artificial Sequence
  Synthetic sequence or sequence of unknown origin
aauauuaggaccuagcaauac

SEQ ID NO: 232 - RNA, 17 nt, Artificial Sequence
  Synthetic sequence or sequence of unknown origin
uuaggaccuagcaauac

SEQ ID NO: 233 - RNA, 14 nt, Artificial Sequence
  Synthetic sequence or sequence of unknown origin
ggaccuagcaauac

SEQ ID NO: 234 - RNA, 10 nt, Artificial Sequence
  Synthetic sequence or sequence of unknown origin
cuagcaauac

SEQ ID NO: 235 - RNA, 18 nt, Artificial Sequence
  Synthetic sequence or sequence of unknown origin
guuuugggccucugaugg

SEQ ID NO: 236 - RNA, 15 nt, Artificial Sequence
  Synthetic sequence or sequence of unknown origin
guuuugggccucuga

SEQ ID NO: 237 - RNA, 12 nt, Artificial Sequence
  Synthetic sequence or sequence of unknown origin
guuuugggccuc

SEQ ID NO: 238 - RNA, 10 nt, Artificial Sequence
  Synthetic sequence or sequence of unknown origin
guuuugggcc

SEQ ID NO: 239 - RNA, 18 nt, Artificial Sequence
  Synthetic sequence or sequence of unknown origin
ccaucagagaccugagau

SEQ ID NO: 240 - RNA, 15 nt, Artificial Sequence
  Synthetic sequence or sequence of unknown origin
ucagagaccugagau

SEQ ID NO: 241 - RNA, 12 nt, Artificial Sequence
  Synthetic sequence or sequence of unknown origin
gagaccugagau

SEQ ID NO: 242 - RNA, 10 nt, Artificial Sequence
  Synthetic sequence or sequence of unknown origin
gaccugagau

SEQ ID NO: 243 - RNA, 13 nt, Artificial Sequence
  Synthetic sequence or sequence of unknown origin
aaggcuuuaugcc

SEQ ID NO: 244 - RNA, 11 nt, Artificial Sequence
  Synthetic sequence or sequence of unknown origin
ggcuuuaugcc

SEQ ID NO: 245 - RNA, 49 nt, Artificial Sequence
  Synthetic sequence or sequence of unknown origin
guaggguauggcgguaacccggaguauuccgaauccgcuuuuucuuugc

SEQ ID NO: 246 - RNA, 38 nt, Artificial Sequence
  Synthetic sequence or sequence of unknown origin
cuguaaauacaguauaacauauuauuucguccuuuuuu

SEQ ID NO: 247 - RNA, 32 nt, Artificial Sequence
  Synthetic sequence or sequence of unknown origin
cuguaaauacaguauaacauauuauuucgucc

SEQ ID NO: 248 - RNA, 140 nt, Artificial Sequence
  Synthetic sequence or sequence of unknown origin
guuuugggccucugaugggaaaccaucagagaccugagauaaggcuuuaugccguaggguauggcgguaacccggaguauuccgaauccgcuuuuucuuugccuguaaauacaguauaacauauuauuucguccuuuuuu

SEQ ID NO: 249 - RNA, 98 nt, Artificial Sequence
  Synthetic sequence or sequence of unknown origin
guuuugggccucugaugggaaaccaucagagaccugagauaaggcuuuaugccguaggguauggcgguaacccggaguauuccgaauccgcuuuuuuu

SEQ ID NO: 250 - RNA, 23 nt, Artificial Sequence
  Synthetic sequence or sequence of unknown origin
aaggcuuuaugccguaggguaug

SEQ ID NO: 251 - RNA, 35 nt, Artificial Sequence
  Synthetic sequence or sequence of unknown origin
gcgguaacccggaguauuccgaauccgcuuuuuuu

SEQ ID NO: 252 - RNA, 28 nt, Artificial Sequence
  Synthetic sequence or sequence of unknown origin
gcgguaacccggaguauuccgaauccgc

SEQ ID NO: 253 - RNA, 16 nt, Artificial Sequence
  Synthetic sequence or sequence of unknown origin
guugugaauugcuuuc

SEQ ID NO: 254 - RNA, 15 nt, Artificial Sequence
  Synthetic sequence or sequence of unknown origin
guugugaauugcuuu

SEQ ID NO: 255 - RNA, 12 nt, Artificial Sequence
  Synthetic sequence or sequence of unknown origin
guugugaauugc

SEQ ID NO: 256 - RNA, 10 nt, Artificial Sequence
  Synthetic sequence or sequence of unknown origin
guugugaauu

SEQ ID NO: 257 - RNA, 16 nt, Artificial Sequence
  Synthetic sequence or sequence of unknown origin
gaaagcaauucacaau

SEQ ID NO: 258 - RNA, 15 nt, Artificial Sequence
  Synthetic sequence or sequence of unknown origin
aaagcaauucacaau

SEQ ID NO: 259 - RNA, 12 nt, Artificial Sequence
  Synthetic sequence or sequence of unknown origin
gcaauucacaau

SEQ ID NO: 260 - RNA, 10 nt, Artificial Sequence
  Synthetic sequence or sequence of unknown origin
aauucacaau

SEQ ID NO: 261 - RNA, 17 nt, Artificial Sequence
  Synthetic sequence or sequence of unknown origin
aaggauuauuccguugu

SEQ ID NO: 262 - RNA, 10 nt, Artificial Sequence
  Synthetic sequence or sequence of unknown origin
ggauuauucc

SEQ ID NO: 263 - RNA, 40 nt, Artificial Sequence
  Synthetic sequence or sequence of unknown origin
gaaaacauuuaggacggggcaacucguccuuuguuuuuuu

SEQ ID NO: 264 - RNA, 33 nt, Artificial Sequence
  Synthetic sequence or sequence of unknown origin
gaaaacauuuaggacggggcaacucguccuuug

SEQ ID NO: 265 - RNA, 93 nt, Artificial Sequence
  Synthetic sequence or sequence of unknown origin
guugugaauugcuuucgaaagaaagcaauucacaauaaggauuauuccguugugaaaacauuuaggacggggcaacucguccuuuguuuuuuu

SEQ ID NO: 266 - RNA, 16 nt, Artificial Sequence
  Synthetic sequence or sequence of unknown origin
guugugaauugcuuuc

SEQ ID NO: 267 - RNA, 15 nt, Artificial Sequence
  Synthetic sequence or sequence of unknown origin
guugugaauugcuuu

SEQ ID NO: 268 - RNA, 12 nt, Artificial Sequence
  Synthetic sequence or sequence of unknown origin
guugugaauugc

SEQ ID NO: 269 - RNA, 10 nt, Artificial Sequence
  Synthetic sequence or sequence of unknown origin
guugugaauu

SEQ ID NO: 270 - RNA, 15 nt, Artificial Sequence
  Synthetic sequence or sequence of unknown origin
gaagcaauucacaau

SEQ ID NO: 271 - RNA, 14 nt, Artificial Sequence
  Synthetic sequence or sequence of unknown origin
aagcaauucacaau

SEQ ID NO: 272 - RNA, 12 nt, Artificial Sequence
  Synthetic sequence or sequence of unknown origin
gcaauucacaau

SEQ ID NO: 273 - RNA, 10 nt, Artificial Sequence
  Synthetic sequence or sequence of unknown origin
aauucacaau

SEQ ID NO: 274 - RNA, 14 nt, Artificial Sequence
  Synthetic sequence or sequence of unknown origin
aaggauuauuccgu

SEQ ID NO: 275 - RNA, 10 nt, Artificial Sequence
  Synthetic sequence or sequence of unknown origin
ggauuauucc

SEQ ID NO: 276 - RNA, 12 nt, Artificial Sequence
  Synthetic sequence or sequence of unknown origin
ugugaaaacauc

SEQ ID NO: 277 - RNA, 27 nt, Artificial Sequence
  Synthetic sequence or sequence of unknown origin
aggagcggguucuacucgcucuuuuuu

SEQ ID NO: 278 - RNA, 21 nt, Artificial Sequence
  Synthetic sequence or sequence of unknown origin
aggagcggguucuacucgcuc

SEQ ID NO: 279 - RNA, 88 nt, Artificial Sequence
  Synthetic sequence or sequence of unknown origin
guugugaauugcuuucgaaagaagcaauucacaauaaggauuauuccguugugaaaacaucaggagcggguucuacucgcucuuuuuu

SEQ ID NO: 280 - RNA, 13 nt, Artificial Sequence
  Synthetic sequence or sequence of unknown origin
guugcaccuagac

SEQ ID NO: 281 - RNA, 12 nt, Artificial Sequence
  Synthetic sequence or sequence of unknown origin
guugcaccuaga

SEQ ID NO: 282 - RNA, 10 nt, Artificial Sequence
  Synthetic sequence or sequence of unknown origin
guugcaccua

SEQ ID NO: 283 - RNA, 10 nt, Artificial Sequence
  Synthetic sequence or sequence of unknown origin
gucuuugugu

SEQ ID NO: 284 - RNA, 39 nt, Artificial Sequence
  Synthetic sequence or sequence of unknown origin
uaauaagaaccuuucuuuggaaaggaguucaccauuuac

SEQ ID NO: 285 - RNA, 27 nt, Artificial Sequence
  Synthetic sequence or sequence of unknown origin
aaacaggcacuucggugucuguuuuuu

SEQ ID NO: 286 - RNA, 21 nt, Artificial Sequence
  Synthetic sequence or sequence of unknown origin
aaacaggcacuucggugucug

SEQ ID NO: 287 - RNA, 93 nt, Artificial Sequence
  Synthetic sequence or sequence of unknown origin
guugcaccuagacgaaagucuuuguguuaauaagaaccuuucuuuggaaaggaguucaccauuuacaaacaggcacuucggugucuguuuuuu

SEQ ID NO: 288 - RNA, 17 nt, Artificial Sequence
  Synthetic sequence or sequence of unknown origin
guuugagaguaguguaa

SEQ ID NO: 289 - RNA, 15 nt, Artificial Sequence
  Synthetic sequence or sequence of unknown origin
guuugagaguagugu

SEQ ID NO: 290 - RNA, 12 nt, Artificial Sequence
  Synthetic sequence or sequence of unknown origin
guuugagaguag

SEQ ID NO: 291 - RNA, 10 nt, Artificial Sequence
  Synthetic sequence or sequence of unknown origin
guuugagagu

SEQ ID NO: 292 - RNA, 19 nt, Artificial Sequence
  Synthetic sequence or sequence of unknown origin
uuacacuacaaguucaaau

SEQ ID NO: 293 - RNA, 17 nt, Artificial Sequence
  Synthetic sequence or sequence of unknown origin
acacuacaaguucaaau

SEQ ID NO: 294 - RNA, 14 nt, Artificial Sequence
  Synthetic sequence or sequence of unknown origin
cuacaaguucaaau

SEQ ID NO: 295 - RNA, 12 nt, Artificial Sequence
  Synthetic sequence or sequence of unknown origin
acaaguucaaau

SEQ ID NO: 296 - RNA, 41 nt, Artificial Sequence
  Synthetic sequence or sequence of unknown origin
aaaaauuuauucaaauccuuuugcuacauuguguagaauuu

SEQ ID NO: 297 - RNA, 26 nt, Artificial Sequence
  Synthetic sequence or sequence of unknown origin
aaagaucuggcaacagaucuuuuuuu

SEQ ID NO: 298 - RNA, 19 nt, Artificial Sequence
  Synthetic sequence or sequence of unknown origin
aaagaucuggcaacagauc

SEQ ID NO: 299 - RNA, 107 nt, Artificial Sequence
  Synthetic sequence or sequence of unknown origin
guuugagaguaguguaagaaauuacacuacaaguucaaauaaaaauuuauucaaauccuuuugcuacauuguguagaauuuaaagaucuggcaacagaucuuuuuuu

SEQ ID NO: 300 - RNA, 107 nt, Artificial Sequence
  Synthetic sequence or sequence of unknown origin
guuugagaguaguguaagaaauuacacuacaaguucaaauaaaaauuuauucaaauccauuugcuacauuguguagaauuuaaagaucuggcaacagaucuuuuuuu

SEQ ID NO: 301 - RNA, 41 nt, Artificial Sequence
  Synthetic sequence or sequence of unknown origin
aaaaauuuauucaaauccauuugcuacauuguguagaauuu

SEQ ID NO: 302 - RNA, 18 nt, Artificial Sequence
  Synthetic sequence or sequence of unknown origin
guugcaccuagacaccga

SEQ ID NO: 303 - RNA, 15 nt, Artificial Sequence
  Synthetic sequence or sequence of unknown origin
guugcaccuagacac

SEQ ID NO: 304 - RNA, 12 nt, Artificial Sequence
  Synthetic sequence or sequence of unknown origin
guugcaccuaga

SEQ ID NO: 305 - RNA, 10 nt, Artificial Sequence
  Synthetic sequence or sequence of unknown origin
guugcaccua

SEQ ID NO: 306 - RNA, 15 nt, Artificial Sequence
  Synthetic sequence or sequence of unknown origin
ucggugucuuugugu

SEQ ID NO: 307 - RNA, 12 nt, Artificial Sequence
  Synthetic sequence or sequence of unknown origin
gugucuuugugu

SEQ ID NO: 308 - RNA, 39 nt, Artificial Sequence; identical to SEQ ID NO: 284
  Synthetic sequence or sequence of unknown origin

SEQ ID NO: 309 - RNA, 24 nt, Artificial Sequence
  Synthetic sequence or sequence of unknown origin
gaaccuuucuuuggaaaggaguuc

SEQ ID NO: 310 - RNA, 27 nt, Artificial Sequence
  Synthetic sequence or sequence of unknown origin
aaacaggcacuucggugucuguuuuuu

SEQ ID NO: 311 - RNA, 21 nt, Artificial Sequence
  Synthetic sequence or sequence of unknown origin
aaacaggcacuucggugucug

SEQ ID NO: 312 - RNA, 103 nt, Artificial Sequence
  Synthetic sequence or sequence of unknown origin
guugcaccuagacaccgagaaaucggugucuuuguguuaauaagaaccuuucuuuggaaaggaguucaccauuuacaaacaggcacuucggugucuguuuuuu

SEQ ID NO: 313 - RNA, 16 nt, Artificial Sequence
  Synthetic sequence or sequence of unknown origin
guugcaccuagacacc

SEQ ID NO: 314 - RNA, 15 nt, Artificial Sequence
  Synthetic sequence or sequence of unknown origin
guugcaccuagacac

SEQ ID NO: 315 - RNA, 12 nt, Artificial Sequence
  Synthetic sequence or sequence of unknown origin
guugcaccuaga

SEQ ID NO: 316 - RNA, 10 nt, Artificial Sequence
  Synthetic sequence or sequence of unknown origin
guugcaccua

SEQ ID NO: 317 - RNA, 13 nt, Artificial Sequence
  Synthetic sequence or sequence of unknown origin
ggugucuuugugu

SEQ ID NO: 318 - RNA, 12 nt, Artificial Sequence
  Synthetic sequence or sequence of unknown origin
gugucuuugugu

SEQ ID NO: 319 - RNA, 39 nt, Artificial Sequence; identical to SEQ ID NO: 284
  Synthetic sequence or sequence of unknown origin

SEQ ID NO: 320 - RNA, 28 nt, Artificial Sequence
  Synthetic sequence or sequence of unknown origin
aaacaggcacuucggugucuguuuuuuu

SEQ ID NO: 321 - RNA, 21 nt, Artificial Sequence
  Synthetic sequence or sequence of unknown origin
aaacaggcacuucggugucug

SEQ ID NO: 322 - RNA, 100 nt, Artificial Sequence
  Synthetic sequence or sequence of unknown origin
guugcaccuagacaccgaaaggugucuuuguguuaauaagaaccuuucuuuggaaaggaguucaccauuuacaaacaggcacuucggugucuguuuuuuu

SEQ ID NO: 323 - RNA, 17 nt, Artificial Sequence
  Synthetic sequence or sequence of unknown origin
guuugagagucgugcug

SEQ ID NO: 324 - RNA, 15 nt, Artificial Sequence
  Synthetic sequence or sequence of unknown origin
guuugagagucgugc

SEQ ID NO: 325 - RNA, 12 nt, Artificial Sequence
  Synthetic sequence or sequence of unknown origin
guuugagagucg

SEQ ID NO: 326 - RNA, 10 nt, Artificial Sequence
  Synthetic sequence or sequence of unknown origin
guuugagagu

SEQ ID NO: 327 - RNA, 19 nt, Artificial Sequence
  Synthetic sequence or sequence of unknown origin
caacacgacggguucaaau

SEQ ID NO: 328 - RNA, 17 nt, Artificial Sequence
  Synthetic sequence or sequence of unknown origin
acacgacggguucaaau

SEQ ID NO: 329 - RNA, 14 nt, Artificial Sequence
  Synthetic sequence or sequence of unknown origin
cgacggguucaaau

SEQ ID NO: 330 - RNA, 12 nt, Artificial Sequence
  Synthetic sequence or sequence of unknown origin
acggguucaaau

SEQ ID NO: 331 - RNA, 14 nt, Artificial Sequence
  Synthetic sequence or sequence of unknown origin
acggcuuugccaaa

SEQ ID NO: 332 - RNA, 37 nt, Artificial Sequence
  Synthetic sequence or sequence of unknown origin
accgcugguuugauccagcuucacagugugugagggu

SEQ ID NO: 333 - RNA, 27 nt, Artificial Sequence
  Synthetic sequence or sequence of unknown origin
aaaaaguccgcuaugcggacuuuuuuu

SEQ ID NO: 334 - RNA, 20 nt, Artificial Sequence
  Synthetic sequence or sequence of unknown origin
aaaaaguccgcuaugcggac

SEQ ID NO: 335 - RNA, 118 nt, Artificial Sequence
  Synthetic sequence or sequence of unknown origin
guuugagagucgugcuggaaacaacacgacggguucaaauacggcuuugccaaaaccgcugguuugauccagcuucacagugugugaggguaaaaaguccgcuaugcggacuuuuuuu

SEQ ID NO: 336 - RNA, 17 nt, Artificial Sequence
  Synthetic sequence or sequence of unknown origin
guuugaguaugguguua

SEQ ID NO: 337 - RNA, 15 nt, Artificial Sequence
  Synthetic sequence or sequence of unknown origin
guuugaguauggugu

SEQ ID NO: 338 - RNA, 12 nt, Artificial Sequence
  Synthetic sequence or sequence of unknown origin
guuugaguaugg

SEQ ID NO: 339 - RNA, 10 nt, Artificial Sequence
  Synthetic sequence or sequence of unknown origin
guuugaguau

SEQ ID NO: 340 - RNA, 19 nt, Artificial Sequence
  Synthetic sequence or sequence of unknown origin
uaacaccauuaguucaaau

SEQ ID NO: 341 - RNA, 17 nt, Artificial Sequence
  Synthetic sequence or sequence of unknown origin
acaccauuaguucaaau

SEQ ID NO: 342 - RNA, 14 nt, Artificial Sequence
  Synthetic sequence or sequence of unknown origin
ccauuaguucaaau

SEQ ID NO: 343 - RNA, 12 nt, Artificial Sequence
  Synthetic sequence or sequence of unknown origin
auuaguucaaau

SEQ ID NO: 344 - RNA, 16 nt, Artificial Sequence
  Synthetic sequence or sequence of unknown origin
aagauuuuuucaaauc

SEQ ID NO: 345 - RNA, 14 nt, Artificial Sequence
  Synthetic sequence or sequence of unknown origin
gauuuuuucaaauc

SEQ ID NO: 346 - RNA, 15 nt, Artificial Sequence
  Synthetic sequence or sequence of unknown origin
gccgauuuuucggua

SEQ ID NO: 347 - RNA, 18 nt, Artificial Sequence
  Synthetic sequence or sequence of unknown origin
guacacgauguguacauu

SEQ ID NO: 348 - RNA, 29 nt, Artificial Sequence
  Synthetic sequence or sequence of unknown origin
ggaucuguugcaagacagguccuuuuuuu

SEQ ID NO: 349 - RNA, 22 nt, Artificial Sequence
  Synthetic sequence or sequence of unknown origin
ggaucuguugcaagacaggucc

SEQ ID NO: 350 - RNA, 118 nt, Artificial Sequence
  Synthetic sequence or sequence of unknown origin
guuugaguaugguguuagaaauaacaccauuaguucaaauaagauuuuuucaaaucgccgauuuuucgguaguacacgauguguacauuggaucuguugcaagacagguccuuuuuuu

SEQ ID NO: 351 - RNA, 118 nt, Artificial Sequence
  Synthetic sequence or sequence of unknown origin
guuugaguaugguguuagaaauaacaccauuaguucaaauaagauuuauucaaaucgccgauauuucgguaguacacgauguguacauuggaucuguugcaagacagguccuuuuuuu

SEQ ID NO: 352 - RNA, 16 nt, Artificial Sequence
  Synthetic sequence or sequence of unknown origin
aagauuuauucaaauc

SEQ ID NO: 353 - RNA, 15 nt, Artificial Sequence
  Synthetic sequence or sequence of unknown origin
gccgauauuucggua

SEQ ID NO: 354 - RNA, 93 nt, Artificial Sequence
  Synthetic sequence or sequence of unknown origin
guuugaguaugguguuagaaauaacaccauuaguucaaauaagauuuuuucaaaucgccgauuuuucgguaguacacgauguguacauuuuuu

SEQ ID NO: 355 - RNA, 17 nt, Artificial Sequence
  Synthetic sequence or sequence of unknown origin
guuugagaguaguguaa

SEQ ID NO: 356 - RNA, 15 nt, Artificial Sequence
  Synthetic sequence or sequence of unknown origin
guuugagaguagugu

SEQ ID NO: 357 - RNA, 12 nt, Artificial Sequence
  Synthetic sequence or sequence of unknown origin
guuugagaguag

SEQ ID NO: 358 - RNA, 10 nt, Artificial Sequence
  Synthetic sequence or sequence of unknown origin
guuugagagu

SEQ ID NO: 359 - RNA, 19 nt, Artificial Sequence
  Synthetic sequence or sequence of unknown origin
uuacacuacaaguucaaau

SEQ ID NO: 360 - RNA, 17 nt, Artificial Sequence
  Synthetic sequence or sequence of unknown origin
acacuacaaguucaaau

SEQ ID NO: 361 - RNA, 14 nt, Artificial Sequence
  Synthetic sequence or sequence of unknown origin
cuacaaguucaaau

SEQ ID NO: 362 - RNA, 12 nt, Artificial Sequence
  Synthetic sequence or sequence of unknown origin
acaaguucaaau

SEQ ID NO: 363 - RNA, 47 nt, Artificial Sequence
  Synthetic sequence or sequence of unknown origin
aaaaauuuauucuaaucgcucuucggagccuccacaggaguggauuu

SEQ ID NO: 364 - RNA, 26 nt, Artificial Sequence
  Synthetic sequence or sequence of unknown origin
aagacuugcuucggcgagucuuuuuu

SEQ ID NO: 365 - RNA, 20 nt, Artificial Sequence
  Synthetic sequence or sequence of unknown origin
aagacuugcuucggcgaguc

SEQ ID NO: 366 - RNA, 113 nt, Artificial Sequence
  Synthetic sequence or sequence of unknown origin
guuugagaguaguguaagaaauuacacuacaaguucaaauaaaaauuuauucuaaucgcucuucggagccuccacaggaguggauuuaagacuugcuucggcgagucuuuuuu

SEQ ID NO: 367 - RNA, 16 nt, Artificial Sequence
  Synthetic sequence or sequence of unknown origin
guugugauucgcuucc

SEQ ID NO: 368 - RNA, 15 nt, Artificial Sequence
  Synthetic sequence or sequence of unknown origin
guugugauucgcuuc

SEQ ID NO: 369 - RNA, 12 nt, Artificial Sequence
  Synthetic sequence or sequence of unknown origin
guugugauucgc

SEQ ID NO: 370 - RNA, 10 nt, Artificial Sequence
  Synthetic sequence or sequence of unknown origin
guugugauuc

SEQ ID NO: 371 - RNA, 16 nt, Artificial Sequence
  Synthetic sequence or sequence of unknown origin
gcaagcgaaucacaau

SEQ ID NO: 372 - RNA, 15 nt, Artificial Sequence
  Synthetic sequence or sequence of unknown origin
caagcgaaucacaau

SEQ ID NO: 373 - RNA, 12 nt, Artificial Sequence
  Synthetic sequence or sequence of unknown origin
gcgaaucacaau

SEQ ID NO: 374 - RNA, 10 nt, Artificial Sequence
  Synthetic sequence or sequence of unknown origin
gaaucacaau

SEQ ID NO: 375 - RNA, 14 nt, Artificial Sequence
  Synthetic sequence or sequence of unknown origin
aaggauuauuccgu

SEQ ID NO: 376 - RNA, 10 nt, Artificial Sequence
  Synthetic sequence or sequence of unknown origin
ggauuauucc

SEQ ID NO: 377 - RNA, 13 nt, Artificial Sequence
  Synthetic sequence or sequence of unknown origin
ugugaaaacauuu

SEQ ID NO: 378 - RNA, 35 nt, Artificial Sequence
  Synthetic sequence or sequence of unknown origin
aagucgggccuccuucgguuggcucggcuuuuuuu

SEQ ID NO: 379 - RNA, 28 nt, Artificial Sequence
  Synthetic sequence or sequence of unknown origin
aagucgggccuccuucgguuggcucggc

SEQ ID NO: 380 - RNA, 98 nt, Artificial Sequence
  Synthetic sequence or sequence of unknown origin
guugugauucgcuuccgaaagcaagcgaaucacaauaaggauuauuccguugugaaaacauuuaagucgggccuccuucgguuggcucggcuuuuuuu

SEQ ID NO: 381 - RNA, 16 nt, Artificial Sequence
  Synthetic sequence or sequence of unknown origin
guuugagaguauuguu

SEQ ID NO: 382 - RNA, 15 nt, Artificial Sequence
  Synthetic sequence or sequence of unknown origin
guuugagaguauugu

SEQ ID NO: 383 - RNA, 12 nt, Artificial Sequence
  Synthetic sequence or sequence of unknown origin
guuugagaguau

SEQ ID NO: 384 - RNA, 10 nt, Artificial Sequence
  Synthetic sequence or sequence of unknown origin
guuugagagu

SEQ ID NO: 385 - RNA, 15 nt, Artificial Sequence
  Synthetic sequence or sequence of unknown origin
aacaaucguucaaau

SEQ ID NO: 386 - RNA, 14 nt, Artificial Sequence
  Synthetic sequence or sequence of unknown origin
acaaucguucaaau

SEQ ID NO: 387 - RNA, 11 nt, Artificial Sequence
  Synthetic sequence or sequence of unknown origin
aucguucaaau

SEQ ID NO: 388 - RNA, 17 nt, Artificial Sequence
  Synthetic sequence or sequence of unknown origin
aagguuuuaccuuaagc

SEQ ID NO: 389 - RNA, 13 nt, Artificial Sequence
  Synthetic sequence or sequence of unknown origin
aagguuuuaccuu

SEQ ID NO: 390 - RNA, 13 nt, Artificial Sequence
  Synthetic sequence or sequence of unknown origin
auccuauuggauc

SEQ ID NO: 391 - RNA, 29 nt, Artificial Sequence
  Synthetic sequence or sequence of unknown origin
agucgacuaaucagagucgacuauuuuuu

SEQ ID NO: 392 - RNA, 23 nt, Artificial Sequence
  Synthetic sequence or sequence of unknown origin
agucgacuaaucagagucgacua

SEQ ID NO: 393 - RNA, 94 nt, Artificial Sequence
  Synthetic sequence or sequence of unknown origin
guuugagaguauuguugaaaaacaaucguucaaauaagguuuuaccuuaagcauccuauuggaucagucgacuaaucagagucgacuauuuuuu

SEQ ID NO: 394 - RNA, 94 nt, Artificial Sequence
  Synthetic sequence or sequence of unknown origin
guuugagaguauuguugaaaaacaaucguucaaauaagguauuaccuuaagcauccuauuggaucagucgacuaaucagagucgacuauuuuuu

SEQ ID NO: 395 - RNA, 17 nt, Artificial Sequence
  Synthetic sequence or sequence of unknown origin
aagguauuaccuuaagc

SEQ ID NO: 396 - RNA, 16 nt, Artificial Sequence
  Synthetic sequence or sequence of unknown origin
guuuuacuugccuguc

SEQ ID NO: 397 - RNA, 15 nt, Artificial Sequence
  Synthetic sequence or sequence of unknown origin
guuuuacuugccugu

SEQ ID NO: 398 - RNA, 12 nt, Artificial Sequence
  Synthetic sequence or sequence of unknown origin
guuuuacuugcc

SEQ ID NO: 399 - RNA, 10 nt, Artificial Sequence
  Synthetic sequence or sequence of unknown origin
guuuuacuug

SEQ ID NO: 400 - RNA, 15 nt, Artificial Sequence
  Synthetic sequence or sequence of unknown origin
gauaggcaauaaaac

SEQ ID NO: 401 - RNA, 14 nt, Artificial Sequence
  Synthetic sequence or sequence of unknown origin
auaggcaauaaaac

SEQ ID NO: 402 - RNA, 11 nt, Artificial Sequence
  Synthetic sequence or sequence of unknown origin
ggcaauaaaac

SEQ ID NO: 403 - RNA, 37 nt, Artificial Sequence
  Synthetic sequence or sequence of unknown origin
aaauauaauuucuuuugaaauuauauguaaaauguuu

SEQ ID NO: 404 - RNA, 24 nt, Artificial Sequence
  Synthetic sequence or sequence of unknown origin
auauaauuucuuuugaaauuauau

SEQ ID NO: 405 - RNA, 29 nt, Artificial Sequence
  Synthetic sequence or sequence of unknown origin
aaagcccuccuuuucaggggggcuuuuuu

SEQ ID NO: 406 - RNA, 23 nt, Artificial Sequence
  Synthetic sequence or sequence of unknown origin
aaagcccuccuuuucaggggggc

SEQ ID NO: 407 - RNA, 101 nt, Artificial Sequence
  Synthetic sequence or sequence of unknown origin
guuuuacuugccugucgaaagauaggcaauaaaacaaauauaauuucuuuugaaauuauauguaaaauguuuaaagcccuccuuuucaggggggcuuuuuu

SEQ ID NO: 408 - RNA, 101 nt, Artificial Sequence
  Synthetic sequence or sequence of unknown origin
guuguacuugccugucgaaagauaggcaauauaacaaauauaauuucuucugaaauuauauguaaaauguuuaaagcccuccuuaucaggggggcuuuuuu

SEQ ID NO: 409 - RNA, 16 nt, Artificial Sequence
  Synthetic sequence or sequence of unknown origin
guuguacuugccuguc

SEQ ID NO: 410 - RNA, 15 nt, Artificial Sequence
  Synthetic sequence or sequence of unknown origin
guuguacuugccugu

SEQ ID NO: 411 - RNA, 12 nt, Artificial Sequence
  Synthetic sequence or sequence of unknown origin
guuguacuugcc

SEQ ID NO: 412 - RNA, 10 nt, Artificial Sequence
  Synthetic sequence or sequence of unknown origin
guuguacuug

SEQ ID NO: 413 - RNA, 15 nt, Artificial Sequence
  Synthetic sequence or sequence of unknown origin
gauaggcaauauaac

SEQ ID NO: 414 - RNA, 14 nt, Artificial Sequence
  Synthetic sequence or sequence of unknown origin
auaggcaauauaac

SEQ ID NO: 415 - RNA, 11 nt, Artificial Sequence
  Synthetic sequence or sequence of unknown origin
ggcaauauaac

SEQ ID NO: 416 - RNA, 37 nt, Artificial Sequence
  Synthetic sequence or sequence of unknown origin
aaauauaauuucuucugaaauuauauguaaaauguuu

SEQ ID NO: 417 - RNA, 29 nt, Artificial Sequence
  Synthetic sequence or sequence of unknown origin
aaagcccuccuuaucaggggggcuuuuuu

SEQ ID NO: 418 - RNA, 23 nt, Artificial Sequence
  Synthetic sequence or sequence of unknown origin
aaagcccuccuuaucaggggggc

SEQ ID NO: 419 - RNA, 20 nt, Artificial Sequence
  Synthetic sequence or sequence of unknown origin
guugugauuugcucucaaau

SEQ ID NO: 420 - RNA, 15 nt, Artificial Sequence
  Synthetic sequence or sequence of unknown origin
guugugauuugcucu

SEQ ID NO: 421 - RNA, 12 nt, Artificial Sequence
  Synthetic sequence or sequence of unknown origin
guugugauuugc

SEQ ID NO: 422 - RNA, 10 nt, Artificial Sequence
  Synthetic sequence or sequence of unknown origin
guugugauuu

SEQ ID NO: 423 - RNA, 21 nt, Artificial Sequence
  Synthetic sequence or sequence of unknown origin
auuugugagacuuaucacaac

SEQ ID NO: 424 - RNA, 16 nt, Artificial Sequence
  Synthetic sequence or sequence of unknown origin
ugagacuuaucacaac

SEQ ID NO: 425 - RNA, 13 nt, Artificial Sequence
  Synthetic sequence or sequence of unknown origin
gacuuaucacaac

SEQ ID NO: 426 - RNA, 10 nt, Artificial Sequence
  Synthetic sequence or sequence of unknown origin
uuaucacaac

SEQ ID NO: 427 - RNA, 21 nt, Artificial Sequence
  Synthetic sequence or sequence of unknown origin
aaggcuauaagccgaaguauu

SEQ ID NO: 428 - RNA, 11 nt, Artificial Sequence
  Synthetic sequence or sequence of unknown origin
ggcuauaagcc

SEQ ID NO: 429 - RNA, 30 nt, Artificial Sequence
  Synthetic sequence or sequence of unknown origin
aacuccgcgauuuugucguggaguuuuuuu

SEQ ID NO: 430 - RNA, 23 nt, Artificial Sequence
  Synthetic sequence or sequence of unknown origin
aacuccgcgauuuugucguggag

SEQ ID NO: 431 - RNA, 96 nt, Artificial Sequence
  Synthetic sequence or sequence of unknown origin
guugugauuugcucucaaaugaaaauuugugagacuuaucacaacaaggcuauaagccgaaguauuaacuccgcgauuuugucguggaguuuuuuu

SEQ ID NO: 432 - RNA, 96 nt, Artificial Sequence
  Synthetic sequence or sequence of unknown origin
guugugauuugcucucaaaugaaaauuugugagacuuaucacaacaaggcuauaagccgaaguauuaacuccgcgauuaugucguggaguuuuuuu

SEQ ID NO: 433 - RNA, 30 nt, Artificial Sequence
  Synthetic sequence or sequence of unknown origin
aacuccgcgauuaugucguggaguuuuuuu

SEQ ID NO: 434 - RNA, 23 nt, Artificial Sequence
  Synthetic sequence or sequence of unknown origin
aacuccgcgauuaugucguggag

SEQ ID NO: 435 - RNA, 16 nt, Artificial Sequence
  Synthetic sequence or sequence of unknown origin
guugugauuugcugag

SEQ ID NO: 436 - RNA, 15 nt, Artificial Sequence
  Synthetic sequence or sequence of unknown origin
guugugauuugcuga

SEQ ID NO: 437 - RNA, 12 nt, Artificial Sequence
  Synthetic sequence or sequence of unknown origin
guugugauuugc

SEQ ID NO: 438 - RNA, 10 nt, Artificial Sequence
  Synthetic sequence or sequence of unknown origin
guugugauuu

SEQ ID NO: 439 - RNA, 15 nt, Artificial Sequence
  Synthetic sequence or sequence of unknown origin
cuagcaaaucacaau

SEQ ID NO: 440 - RNA, 14 nt, Artificial Sequence
  Synthetic sequence or sequence of unknown origin
uagcaaaucacaau

SEQ ID NO: 441 - RNA, 12 nt, Artificial Sequence
  Synthetic sequence or sequence of unknown origin
gcaaaucacaau

SEQ ID NO: 442 - RNA, 10 nt, Artificial Sequence
  Synthetic sequence or sequence of unknown origin
aaaucacaau

SEQ ID NO: 443 - RNA, 33 nt, Artificial Sequence
  Synthetic sequence or sequence of unknown origin
aaggauuauuccguugugaacacauuagguccc

SEQ ID NO: 444 - RNA, 10 nt, Artificial Sequence
  Synthetic sequence or sequence of unknown origin
ggauuauucc

SEQ ID NO: 445 - RNA, 33 nt, Artificial Sequence
  Synthetic sequence or sequence of unknown origin
aacccaucguccuuuaacgguggguuauuuuuu

SEQ ID NO: 446 - RNA, 27 nt, Artificial Sequence
  Synthetic sequence or sequence of unknown origin
aacccaucguccuuuaacgguggguua

SEQ ID NO: 447 - RNA, 101 nt, Artificial Sequence
  Synthetic sequence or sequence of unknown origin
guugugauuugcugaggaaacuagcaaaucacaauaaggauuauuccguugugaacacauuaggucccaacccaucguccuuuaacgguggguuauuuuuu

SEQ ID NO: 448 - RNA, 17 nt, Artificial Sequence
  Synthetic sequence or sequence of unknown origin
guuugagagccuuguua

SEQ ID NO: 449 - RNA, 15 nt, Artificial Sequence
  Synthetic sequence or sequence of unknown origin
guuugagagccuugu

SEQ ID NO: 450 - RNA, 12 nt, Artificial Sequence
  Synthetic sequence or sequence of unknown origin
guuugagagccu

SEQ ID NO: 451 - RNA, 10 nt, Artificial Sequence
  Synthetic sequence or sequence of unknown origin
guuugagagc

SEQ ID NO: 452 - RNA, 19 nt, Artificial Sequence
  Synthetic sequence or sequence of unknown origin
uaacaaggcgagugcaaau

SEQ ID NO: 453 - RNA, 17 nt, Artificial Sequence
  Synthetic sequence or sequence of unknown origin
acaaggcgagugcaaau

SEQ ID NO: 454 - RNA, 14 nt, Artificial Sequence
  Synthetic sequence or sequence of unknown origin
aggcgagugcaaau

SEQ ID NO: 455 - RNA, 12 nt, Artificial Sequence
  Synthetic sequence or sequence of unknown origin
gcgagugcaaau

SEQ ID NO: 456 - RNA, 18 nt, Artificial Sequence
  Synthetic sequence or sequence of unknown origin
aagguuuaaccgaauuca

SEQ ID NO: 457 - RNA, 11 nt, Artificial Sequence
  Synthetic sequence or sequence of unknown origin
ccguuuaugga

SEQ ID NO: 458 - RNA, 20 nt, Artificial Sequence
  Synthetic sequence or sequence of unknown origin
ccgcauugugcggauuuuaa

SEQ ID NO: 459 - RNA, 23 nt, Artificial Sequence
  Synthetic sequence or sequence of unknown origin
aaaagacuuucaaagucuuuuuu

SEQ ID NO: 460 - RNA, 17 nt, Artificial Sequence
  Synthetic sequence or sequence of unknown origin
aaaagacuuucaaaguc

SEQ ID NO: 461 - RNA, 112 nt, Artificial Sequence
  Synthetic sequence or sequence of unknown origin
guuugagagccuuguuagaaauaacaaggcgagugcaaauaagguuuaaccgaauucaccguuuauggaccgcauugugcggauuuuaaaaaagacuuucaaagucuuuuuu

SEQ ID NO: 462 - RNA, 112 nt, Artificial Sequence
  Synthetic sequence or sequence of unknown origin
guuugagagccuuguuagaaauaacaaggcgagugcaaauaagguuuaaccgaauucaccguuuauggaccgcauugugcggauuuaaaaaaagacuuucaaagucuuuuuu

SEQ ID NO: 463 - RNA, 20 nt, Artificial Sequence
  Synthetic sequence or sequence of unknown origin
ccgcauugugcggauuuaaa

SEQ ID NO: 464 - RNA, 89 nt, Artificial Sequence
  Synthetic sequence or sequence of unknown origin
guuugagagccuuguuagaaauaacaaggcgagugcaaauaagguuuaaccgaauucaccguuuauggaccgcauugugcggauuuuuu

SEQ ID NO: 465 - RNA, 23 nt, Artificial Sequence
  Synthetic sequence or sequence of unknown origin
guugugaauugcuugaaauucuu

SEQ ID NO: 466 - RNA, 15 nt, Artificial Sequence
  Synthetic sequence or sequence of unknown origin
guugugaauugcuug

SEQ ID NO: 467 - RNA, 12 nt, Artificial Sequence
  Synthetic sequence or sequence of unknown origin
guugugaauugc

SEQ ID NO: 468 - RNA, 10 nt, Artificial Sequence
  Synthetic sequence or sequence of unknown origin
guugugaauu

SEQ ID NO: 469 - RNA, 20 nt, Artificial Sequence
  Synthetic sequence or sequence of unknown origin
gaauuucagcaauucacaau

SEQ ID NO: 470 - RNA, 14 nt, Artificial Sequence
  Synthetic sequence or sequence of unknown origin
cagcaauucacaau

SEQ ID NO: 471 - RNA, 12 nt, Artificial Sequence
  Synthetic sequence or sequence of unknown origin
gcaauucacaau

SEQ ID NO: 472 - RNA, 10 nt, Artificial Sequence
  Synthetic sequence or sequence of unknown origin
aauucacaau

SEQ ID NO: 473 - RNA, 35 nt, Artificial Sequence
  Synthetic sequence or sequence of unknown origin
aaggauuauuccguugugaaaacauucagguuccu

SEQ ID NO: 474 - RNA, 28 nt, Artificial Sequence
  Synthetic sequence or sequence of unknown origin
gcccucguccuuuaacgggggcuuuuuu

SEQ ID NO: 475 - RNA, 22 nt, Artificial Sequence
  Synthetic sequence or sequence of unknown origin
gcccucguccuuuaacgggggc

SEQ ID NO: 476 - RNA, 110 nt, Artificial Sequence
  Synthetic sequence or sequence of unknown origin
guugugaauugcuugaaauucuugaaagaauuucagcaauucacaauaaggauuauuccguugugaaaacauucagguuccugcccucguccuuuaacgggggcuuuuuu

SEQ ID NO: 477 - RNA, 16 nt, Artificial Sequence
  Synthetic sequence or sequence of unknown origin
guugugaauugcuuuc

SEQ ID NO: 478 - RNA, 15 nt, Artificial Sequence
  Synthetic sequence or sequence of unknown origin
guugugaauugcuuu

SEQ ID NO: 479 - RNA, 12 nt, Artificial Sequence
  Synthetic sequence or sequence of unknown origin
guugugaauugc

SEQ ID NO: 480 - RNA, 10 nt, Artificial Sequence
  Synthetic sequence or sequence of unknown origin
guugugaauu

SEQ ID NO: 481 - RNA, 15 nt, Artificial Sequence
  Synthetic sequence or sequence of unknown origin
gaagcaauucacaau

SEQ ID NO: 482 - RNA, 14 nt, Artificial Sequence
  Synthetic sequence or sequence of unknown origin
aagcaauucacaau

SEQ ID NO: 483 - RNA, 12 nt, Artificial Sequence
  Synthetic sequence or sequence of unknown origin
gcaauucacaau

SEQ ID NO: 484 - RNA, 10 nt, Artificial Sequence
  Synthetic sequence or sequence of unknown origin
aauucacaau

SEQ ID NO: 485 - RNA, 14 nt, Artificial Sequence
  Synthetic sequence or sequence of unknown origin
aaggauuauuccgu

SEQ ID NO: 486 - RNA, 10 nt, Artificial Sequence
  Synthetic sequence or sequence of unknown origin
ggauuauucc

SEQ ID NO: 487 - RNA, 13 nt, Artificial Sequence
  Synthetic sequence or sequence of unknown origin
ugugaaaacauuu

SEQ ID NO: 488 - RNA, 35 nt, Artificial Sequence
  Synthetic sequence or sequence of unknown origin
aagagaguccuucguccuucggaggauucuuuuuu

SEQ ID NO: 489 - RNA, 29 nt, Artificial Sequence
  Synthetic sequence or sequence of unknown origin
aagagaguccuucguccuucggaggauuc

SEQ ID NO: 490 - RNA, 97 nt, Artificial Sequence
  Synthetic sequence or sequence of unknown origin
guugugaauugcuuucgaaagaagcaauucacaauaaggauuauuccguugugaaaacauuuaagagaguccuucguccuucggaggauucuuuuuu

SEQ ID NO: 491 - RNA, 19 nt, Artificial Sequence
  Synthetic sequence or sequence of unknown origin
guuauaguucccugauagu

SEQ ID NO: 492 - RNA, 15 nt, Artificial Sequence
  Synthetic sequence or sequence of unknown origin
guuauaguucccuga

SEQ ID NO: 493 - RNA, 12 nt, Artificial Sequence
  Synthetic sequence or sequence of unknown origin
guuauaguuccc

SEQ ID NO: 494 - RNA, 10 nt, Artificial Sequence
  Synthetic sequence or sequence of unknown origin
guuauaguuc

SEQ ID NO: 495 - RNA, 19 nt, Artificial Sequence
  Synthetic sequence or sequence of unknown origin
acuaugagguugcuauaau

SEQ ID NO: 496 - RNA, 15 nt, Artificial Sequence
  Synthetic sequence or sequence of unknown origin
ugagguugcuauaau

SEQ ID NO: 497 - RNA, 12 nt, Artificial Sequence
  Synthetic sequence or sequence of unknown origin
gguugcuauaau

SEQ ID NO: 498 - RNA, 10 nt, Artificial Sequence
  Synthetic sequence or sequence of unknown origin
uugcuauaau

SEQ ID NO: 499 - RNA, 15 nt, Artificial Sequence
  Synthetic sequence or sequence of unknown origin
aagguaguaaaccgc

SEQ ID NO: 500 - RNA, 11 nt, Artificial Sequence
  Synthetic sequence or sequence of unknown origin
gguaguaaacc

SEQ ID NO: 501 - RNA, 44 nt, Artificial Sequence
  Synthetic sequence or sequence of unknown origin
agagcucuaacgccucacauuuguggggcguuaucucuuuuuuu

SEQ ID NO: 502 - RNA, 37 nt, Artificial Sequence
  Synthetic sequence or sequence of unknown origin
agagcucuaacgccucacauuuguggggcguuaucuc

SEQ ID NO: 503 - RNA, 101 nt, Artificial Sequence
  Synthetic sequence or sequence of unknown origin
guuauaguucccugauagugaaaacuaugagguugcuauaauaagguaguaaaccgcagagcucuaacgccucacauuuguggggcguuaucucuuuuuuu

SEQ ID NO: 504 - RNA, 16 nt, Artificial Sequence
  Synthetic sequence or sequence of unknown origin
guugugaauggcuuuc

SEQ ID NO: 505 - RNA, 15 nt, Artificial Sequence
  Synthetic sequence or sequence of unknown origin
guugugaauggcuuu

SEQ ID NO: 506 - RNA, 12 nt, Artificial Sequence
  Synthetic sequence or sequence of unknown origin
guugugaauggc

SEQ ID NO: 507 - RNA, 10 nt, Artificial Sequence
  Synthetic sequence or sequence of unknown origin
guugugaaug

SEQ ID NO: 508 - RNA, 17 nt, Artificial Sequence
  Synthetic sequence or sequence of unknown origin
uugaagccauucacaau

SEQ ID NO: 509 - RNA, 15 nt, Artificial Sequence
  Synthetic sequence or sequence of unknown origin
gaagccauucacaau

SEQ ID NO: 510 - RNA, 12 nt, Artificial Sequence
  Synthetic sequence or sequence of unknown origin
gccauucacaau

SEQ ID NO: 511 - RNA, 10 nt, Artificial Sequence
  Synthetic sequence or sequence of unknown origin
cauucacaau

SEQ ID NO: 512 - RNA, 19 nt, Artificial Sequence
  Synthetic sequence or sequence of unknown origin
aaggauuauuccguuguga

SEQ ID NO: 513 - RNA, 10 nt, Artificial Sequence
  Synthetic sequence or sequence of unknown origin
ggauuauucc

SEQ ID NO: 514 - RNA, 48 nt, Artificial Sequence
  Synthetic sequence or sequence of unknown origin
aaacauuaagagcgggucgugagacucgcucuucuguguuuauuuuuu

SEQ ID NO: 515 - RNA, 42 nt, Artificial Sequence
  Synthetic sequence or sequence of unknown origin
aaacauuaagagcgggucgugagacucgcucuucuguguuua

SEQ ID NO: 516 - RNA, 104 nt, Artificial Sequence
  Synthetic sequence or sequence of unknown origin
guugugaauggcuuucgaaauugaagccauucacaauaaggauuauuccguugugaaaacauuaagagcgggucgugagacucgcucuucuguguuuauuuuuu

SEQ ID NO: 517 - RNA, 19 nt, Artificial Sequence
  Synthetic sequence or sequence of unknown origin
guuguggcuuguugaagaa

SEQ ID NO: 518 - RNA, 15 nt, Artificial Sequence
  Synthetic sequence or sequence of unknown origin
guuguggcuuguuga

SEQ ID NO: 519 - RNA, 12 nt, Artificial Sequence
  Synthetic sequence or sequence of unknown origin
guuguggcuugu

SEQ ID NO: 520 - RNA, 10 nt, Artificial Sequence
  Synthetic sequence or sequence of unknown origin
guuguggcuu

SEQ ID NO: 521 - RNA, 19 nt, Artificial Sequence
  Synthetic sequence or sequence of unknown origin
uucuucaacuugucacaau

SEQ ID NO: 522 - RNA, 15 nt, Artificial Sequence
  Synthetic sequence or sequence of unknown origin
ucaacuugucacaau

SEQ ID NO: 523 - RNA, 12 nt, Artificial Sequence
  Synthetic sequence or sequence of unknown origin
acuugucacaau

SEQ ID NO: 524 - RNA, 10 nt, Artificial Sequence
  Synthetic sequence or sequence of unknown origin
uugucacaau

SEQ ID NO: 525 - RNA, 17 nt, Artificial Sequence
  Synthetic sequence or sequence of unknown origin
aaggcccuuaaggccga

SEQ ID NO: 526 - RNA, 13 nt, Artificial Sequence
  Synthetic sequence or sequence of unknown origin
ggcccuuaaggcc

SEQ ID NO: 527 - RNA, 16 nt, Artificial Sequence
  Synthetic sequence or sequence of unknown origin
agguugaaaaaccuau

SEQ ID NO: 528 - RNA, 26 nt, Artificial Sequence
  Synthetic sequence or sequence of unknown origin
ggcucuacuucgguggagccuuuuuu

SEQ ID NO: 529 - RNA, 20 nt, Artificial Sequence
  Synthetic sequence or sequence of unknown origin
ggcucuacuucgguggagcc

SEQ ID NO: 530 - RNA, 101 nt, Artificial Sequence
  Synthetic sequence or sequence of unknown origin
guuguggcuuguugaagaagaaauucuucaacuugucacaauaaggcccuuaaggccgaagguugaaaaaccuauggcucuacuucgguggagccuuuuuu

SEQ ID NO: 531 - RNA, 16 nt, Artificial Sequence
  Synthetic sequence or sequence of unknown origin
guugugauuugcugaa

SEQ ID NO: 532 - RNA, 15 nt, Artificial Sequence
  Synthetic sequence or sequence of unknown origin
guugugauuugcuga

SEQ ID NO: 533 - RNA, 12 nt, Artificial Sequence
  Synthetic sequence or sequence of unknown origin
guugugauuugc

SEQ ID NO: 534 - RNA, 10 nt, Artificial Sequence
  Synthetic sequence or sequence of unknown origin
guugugauuu

SEQ ID NO: 535 - RNA, 16 nt, Artificial Sequence
  Synthetic sequence or sequence of unknown origin
uucagcaaaucacaau

SEQ ID NO: 536 - RNA, 15 nt, Artificial Sequence
  Synthetic sequence or sequence of unknown origin
ucagcaaaucacaau

SEQ ID NO: 537 - RNA, 12 nt, Artificial Sequence
  Synthetic sequence or sequence of unknown origin
gcaaaucacaau

SEQ ID NO: 538 - RNA, 10 nt, Artificial Sequence
  Synthetic sequence or sequence of unknown origin
aaaucacaau

SEQ ID NO: 539 - RNA, 14 nt, Artificial Sequence
  Synthetic sequence or sequence of unknown origin
aaggauuauuccgu

SEQ ID NO: 540 - RNA, 10 nt, Artificial Sequence
  Synthetic sequence or sequence of unknown origin
ggauuauucc

SEQ ID NO: 541 - RNA, 13 nt, Artificial Sequence
  Synthetic sequence or sequence of unknown origin
ugugaaaacauuc

SEQ ID NO: 542 - RNA, 24 nt, Artificial Sequence
  Synthetic sequence or sequence of unknown origin
aaggcggcgcaagucgccuuuuuu

SEQ ID NO: 543 - RNA, 18 nt, Artificial Sequence
  Synthetic sequence or sequence of unknown origin
aaggcggcgcaagucgcc

SEQ ID NO: 544 - RNA, 87 nt, Artificial Sequence
  Synthetic sequence or sequence of unknown origin
guugugauuugcugaagaaauucagcaaaucacaauaaggauuauuccguugugaaaacauucaaggcggcgcaagucgccuuuuuu

SEQ ID NO: 545 - RNA, 19 nt, Artificial Sequence
  Synthetic sequence or sequence of unknown origin
guuguaguucccuaauguu

SEQ ID NO: 546 - RNA, 15 nt, Artificial Sequence
  Synthetic sequence or sequence of unknown origin
guuguaguucccuaa

SEQ ID NO: 547 - RNA, 12 nt, Artificial Sequence
  Synthetic sequence or sequence of unknown origin
guuguaguuccc

SEQ ID NO: 548 - RNA, 10 nt, Artificial Sequence
  Synthetic sequence or sequence of unknown origin
guuguaguuc

SEQ ID NO: 549 - RNA, 19 nt, Artificial Sequence
  Synthetic sequence or sequence of unknown origin
gacauuagguuacugcgau

SEQ ID NO: 550 - RNA, 15 nt, Artificial Sequence
  Synthetic sequence or sequence of unknown origin
uuagguuacugcgau

SEQ ID NO: 551 - RNA, 12 nt, Artificial Sequence
  Synthetic sequence or sequence of unknown origin
gguuacugcgau

SEQ ID NO: 552 - RNA, 10 nt, Artificial Sequence
  Synthetic sequence or sequence of unknown origin
uuacugcgau

SEQ ID NO: 553 - RNA, 14 nt, Artificial Sequence
  Synthetic sequence or sequence of unknown origin
caggcaguaugccu

SEQ ID NO: 554 - RNA, 13 nt, Artificial Sequence
  Synthetic sequence or sequence of unknown origin
aggcaguaugccu

SEQ ID NO: 555 - RNA, 51 nt, Artificial Sequence
  Synthetic sequence or sequence of unknown origin
cagagcuccgcccuaaccacguuuugugguuggggcgucuuugcauuuuuu

SEQ ID NO: 556 - RNA, 45 nt, Artificial Sequence
  Synthetic sequence or sequence of unknown origin
cagagcuccgcccuaaccacguuuugugguuggggcgucuuugca

SEQ ID NO: 557 - RNA, 107 nt, Artificial Sequence
  Synthetic sequence or sequence of unknown origin
guuguaguucccuaauguugaaagacauuagguuacugcgaucaggcaguaugccucagagcuccgcccuaaccacguuuugugguuggggcgucuuugcauuuuuu

SEQ ID NO: 558 - RNA, 107 nt, Artificial Sequence
  Synthetic sequence or sequence of unknown origin
guuguaguucccuaauguugaaagacauuagguuacugcgaucaggcaguaugccucagagcuccgcccuaaccacgucuugugguuggggcgucuuugcauuuuuu

SEQ ID NO: 559 - RNA, 51 nt, Artificial Sequence
  Synthetic sequence or sequence of unknown origin
cagagcuccgcccuaaccacgucuugugguuggggcgucuuugcauuuuuu

SEQ ID NO: 560 - RNA, 45 nt, Artificial Sequence
  Synthetic sequence or sequence of unknown origin
cagagcuccgcccuaaccacgucuugugguuggggcgucuuugca

SEQ ID NO: 561 - RNA, 17 nt, Artificial Sequence
  Synthetic sequence or sequence of unknown origin
guuugagaaugauguaa

SEQ ID NO: 562 - RNA, 15 nt, Artificial Sequence
  Synthetic sequence or sequence of unknown origin
guuugagaaugaugu

SEQ ID NO: 563 - RNA, 12 nt, Artificial Sequence
  Synthetic sequence or sequence of unknown origin
guuugagaauga

SEQ ID NO: 564 - RNA, 10 nt, Artificial Sequence
  Synthetic sequence or sequence of unknown origin
guuugagaau

SEQ ID NO: 565 - RNA, 19 nt, Artificial Sequence
  Synthetic sequence or sequence of unknown origin
uuacaucauaaguucaaau

SEQ ID NO: 566 - RNA, 17 nt, Artificial Sequence
  Synthetic sequence or sequence of unknown origin
acaucauaaguucaaau

SEQ ID NO: 567 - RNA, 14 nt, Artificial Sequence
  Synthetic sequence or sequence of unknown origin
ucauaaguucaaau

SEQ ID NO: 568 - RNA, 12 nt, Artificial Sequence
  Synthetic sequence or sequence of unknown origin
auaaguucaaau

SEQ ID NO: 569 - RNA, 17 nt, Artificial Sequence
  Synthetic sequence or sequence of unknown origin
aacgauuuaucgaagac

SEQ ID NO: 570 - RNA, 10 nt, Artificial Sequence
  Synthetic sequence or sequence of unknown origin
cgauuuaucg

SEQ ID NO: 571 - RNA, 15 nt, Artificial Sequence
  Synthetic sequence or sequence of unknown origin
gccguuuauaacggc

SEQ ID NO: 572 - RNA, 17 nt, Artificial Sequence
  Synthetic sequence or sequence of unknown origin
ccacagugaguggaaag

SEQ ID NO: 573 - RNA, 32 nt, Artificial Sequence
  Synthetic sequence or sequence of unknown origin
aaagcuguugcucauaggagcagcaguuuuuu

SEQ ID NO: 574 - RNA, 26 nt, Artificial Sequence
  Synthetic sequence or sequence of unknown origin
aaagcuguugcucauaggagcagcag

SEQ ID NO: 575 - RNA, 121 nt, Artificial Sequence
  Synthetic sequence or sequence of unknown origin
guuugagaaugauguaagaaauuacaucauaaguucaaauaacgauuuaucgaagacgccguuuauaacggcccacagugaguggaaagaaagcuguugcucauaggagcagcaguuuuuu

SEQ ID NO: 576 - RNA, 17 nt, Artificial Sequence
  Synthetic sequence or sequence of unknown origin
guuugagaguaguguaa

SEQ ID NO: 577 - RNA, 15 nt, Artificial Sequence
  Synthetic sequence or sequence of unknown origin
guuugagaguagugu

SEQ ID NO: 578 - RNA, 12 nt, Artificial Sequence
  Synthetic sequence or sequence of unknown origin
guuugagaguag

SEQ ID NO: 579 - RNA, 10 nt, Artificial Sequence
  Synthetic sequence or sequence of unknown origin
guuugagagu

SEQ ID NO: 580 - RNA, 19 nt, Artificial Sequence
  Synthetic sequence or sequence of unknown origin
uuacacuacaaguucaaau

SEQ ID NO: 581 - RNA, 17 nt, Artificial Sequence
  Synthetic sequence or sequence of unknown origin
acacuacaaguucaaau

SEQ ID NO: 582 - RNA, 14 nt, Artificial Sequence
  Synthetic sequence or sequence of unknown origin
cuacaaguucaaau

SEQ ID NO: 583 - RNA, 12 nt, Artificial Sequence
  Synthetic sequence or sequence of unknown origin
acaaguucaaau

SEQ ID NO: 584 - RNA, 41 nt, Artificial Sequence; identical to SEQ ID NO: 296
  Synthetic sequence or sequence of unknown origin

SEQ ID NO: 585 - RNA, 32 nt, Artificial Sequence
  Synthetic sequence or sequence of unknown origin
aaagaucuggcaacagaucuuuuuuauuuuuu

SEQ ID NO: 586 - RNA, 26 nt, Artificial Sequence
  Synthetic sequence or sequence of unknown origin
aaagaucuggcaacagaucuuuuuua

SEQ ID NO: 587 - RNA, 113 nt, Artificial Sequence
  Synthetic sequence or sequence of unknown origin
guuugagaguaguguaagaaauuacacuacaaguucaaauaaaaauuuauucaaauccuuuugcuacauuguguagaauuuaaagaucuggcaacagaucuuuuuuauuuuuu

SEQ ID NO: 588 - RNA, 106 nt, Artificial Sequence
  Synthetic sequence or sequence of unknown origin
guuugagaguaguguaagaaauuacacuacaaguucaaauaaaaauuuauucaaauccuuuugcuacauuguguagaauuuaaagaucuggcaacagaucuuuuuu

SEQ ID NO: 589 - RNA, 106 nt, Artificial Sequence
  Synthetic sequence or sequence of unknown origin
guuugagaguaguguaagaaauuacacuacaaguucaaauaaaaauuuauucaaauccauuugcuacauuguguagaauuuaaagaucuggcaacagaucuuuuuu

SEQ ID NO: 590 - RNA, 41 nt, Artificial Sequence; identical to SEQ ID NO: 301
  Synthetic sequence or sequence of unknown origin

SEQ ID NO: 591 - RNA, 17 nt, Artificial Sequence
  Synthetic sequence or sequence of unknown origin
guuugagaaccuuguaa

SEQ ID NO: 592 - RNA, 15 nt, Artificial Sequence
  Synthetic sequence or sequence of unknown origin
guuugagaaccuugu

SEQ ID NO: 593 - RNA, 43 nt, Artificial Sequence
  Synthetic sequence or sequence of unknown origin
gagugcaaauaaggauuuuuccgaaaucacuccucauaagagu

SEQ ID NO: 594 - RNA, 14 nt, Artificial Sequence
  Synthetic sequence or sequence of unknown origin
ccgcauugugcggu

SEQ ID NO: 595 - RNA, 27 nt, Artificial Sequence
  Synthetic sequence or sequence of unknown origin
gaaaagacucugccaagagucuuuuuu

SEQ ID NO: 596 - RNA, 21 nt, Artificial Sequence
  Synthetic sequence or sequence of unknown origin
gaaaagacucugccaagaguc

SEQ ID NO: 597 - RNA, 114 nt, Artificial Sequence
  Synthetic sequence or sequence of unknown origin
guuugagaaccuuguaagaaauuacaaggugagugcaaauaaggauuuuuccgaaaucacuccucauaagaguccgcauugugcggugaaaagacucugccaagagucuuuuuu

SEQ ID NO: 598 - RNA, 114 nt, Artificial Sequence
  Synthetic sequence or sequence of unknown origin
guuugagaaccuuguaagaaauuacaaggugagugcaaauaaggauucuuccgaaaucacuccucauaagaguccgcauugugcggugaaaagacucugccaagagucuuuuuu

SEQ ID NO: 599 - RNA, 43 nt, Artificial Sequence
  Synthetic sequence or sequence of unknown origin
gagugcaaauaaggauucuuccgaaaucacuccucauaagagu

SEQ ID NO: 600 - RNA, 19 nt, Artificial Sequence
  Synthetic sequence or sequence of unknown origin
guuugagaguauuguuauu

SEQ ID NO: 601 - RNA, 15 nt, Artificial Sequence
  Synthetic sequence or sequence of unknown origin
guuugagaguauugu

SEQ ID NO: 602 - RNA, 12 nt, Artificial Sequence
  Synthetic sequence or sequence of unknown origin
guuugagaguau

SEQ ID NO: 603 - RNA, 10 nt, Artificial Sequence
  Synthetic sequence or sequence of unknown origin
guuugagagu

SEQ ID NO: 604 - RNA, 18 nt, Artificial Sequence
  Synthetic sequence or sequence of unknown origin
aauaacaaucguucaaau

SEQ ID NO: 605 - RNA, 14 nt, Artificial Sequence
  Synthetic sequence or sequence of unknown origin
acaaucguucaaau

SEQ ID NO: 606 - RNA, 11 nt, Artificial Sequence
  Synthetic sequence or sequence of unknown origin
aucguucaaau

SEQ ID NO: 607 - RNA, 17 nt, Artificial Sequence
  Synthetic sequence or sequence of unknown origin
aagguuuuaccuuaagc

SEQ ID NO: 608 - RNA, 13 nt, Artificial Sequence
  Synthetic sequence or sequence of unknown origin
aagguuuuaccuu

SEQ ID NO: 609 - RNA, 13 nt, Artificial Sequence
  Synthetic sequence or sequence of unknown origin
auccuauuggauc

SEQ ID NO: 610 - RNA, 29 nt, Artificial Sequence
  Synthetic sequence or sequence of unknown origin
agucgacuaaccagagucgacuauuuuuu

SEQ ID NO: 611 - RNA, 23 nt, Artificial Sequence
  Synthetic sequence or sequence of unknown origin
agucgacuaaccagagucgacua

SEQ ID NO: 612 - RNA, 100 nt, Artificial Sequence
  Synthetic sequence or sequence of unknown origin
guuugagaguauuguuauugaaaaauaacaaucguucaaauaagguuuuaccuuaagcauccuauuggaucagucgacuaaccagagucgacuauuuuuu

SEQ ID NO: 613 - RNA, 100 nt, Artificial Sequence
  Synthetic sequence or sequence of unknown origin
guuugagaguauuguuauugaaaaauaacaaucguucaaauaagguauuaccuuaagcauccuauuggaucagucgacuaaccagagucgacuauuuuuu

SEQ ID NO: 614 - RNA, 17 nt, Artificial Sequence
  Synthetic sequence or sequence of unknown origin
aagguauuaccuuaagc

SEQ ID NO: 615 - RNA, 17 nt, Artificial Sequence
  Synthetic sequence or sequence of unknown origin
guuugagaaccuuguaa

SEQ ID NO: 616 - RNA, 15 nt, Artificial Sequence
  Synthetic sequence or sequence of unknown origin
guuugagaaccuugu

SEQ ID NO: 617 - RNA, 12 nt, Artificial Sequence
  Synthetic sequence or sequence of unknown origin
guuugagaaccu

SEQ ID NO: 618 - RNA, 10 nt, Artificial Sequence
  Synthetic sequence or sequence of unknown origin
guuugagaac

SEQ ID NO: 619 - RNA, 19 nt, Artificial Sequence
  Synthetic sequence or sequence of unknown origin
uuacaaggugagugcaaau

SEQ ID NO: 620 - RNA, 17 nt, Artificial Sequence
  Synthetic sequence or sequence of unknown origin
acaaggugagugcaaau

SEQ ID NO: 621 - RNA, 14 nt, Artificial Sequence
  Synthetic sequence or sequence of unknown origin
aggugagugcaaau

SEQ ID NO: 622 - RNA, 12 nt, Artificial Sequence
  Synthetic sequence or sequence of unknown origin
gugagugcaaau

SEQ ID NO: 623 - RNA, 20 nt, Artificial Sequence
  Synthetic sequence or sequence of unknown origin
aaggauuuuuccgaaaucac

SEQ ID NO: 624 - RNA, 10 nt, Artificial Sequence
  Synthetic sequence or sequence of unknown origin
ggauuuuucc

SEQ ID NO: 625 - RNA, 13 nt, Artificial Sequence
  Synthetic sequence or sequence of unknown origin
uccucauggaugu

SEQ ID NO: 626 - RNA, 14 nt, Artificial Sequence
  Synthetic sequence or sequence of unknown origin
ccgcauugugcggu

SEQ ID NO: 627 - RNA, 28 nt, Artificial Sequence
  Synthetic sequence or sequence of unknown origin
gaaaaagacucuguuuagagucuuuuuu

SEQ ID NO: 628 - RNA, 22 nt, Artificial Sequence
  Synthetic sequence or sequence of unknown origin
gaaaaagacucuguuuagaguc

SEQ ID NO: 629 - RNA, 115 nt, Artificial Sequence
  Synthetic sequence or sequence of unknown origin
guuugagaaccuuguaagaaauuacaaggugagugcaaauaaggauuuuuccgaaaucacuccucauggauguccgcauugugcggugaaaaagacucuguuuagagucuuuuuu

SEQ ID NO: 630 - RNA, 115 nt, Artificial Sequence
  Synthetic sequence or sequence of unknown origin
guuugagaaccuuguaagaaauuacaaggugagugcaaauaaggauucuuccgaaaucacuccucauggauguccgcauugugcggugaaaaagacucuguuuagagucuuuuuu

SEQ ID NO: 631 - RNA, 20 nt, Artificial Sequence
  Synthetic sequence or sequence of unknown origin
aaggauucuuccgaaaucac

SEQ ID NO: 632 - RNA, 19 nt, Artificial Sequence
  Synthetic sequence or sequence of unknown origin
guuguaguucccuguuaau

SEQ ID NO: 633 - RNA, 15 nt, Artificial Sequence
  Synthetic sequence or sequence of unknown origin
guuguaguucccugu

SEQ ID NO: 634 - RNA, 12 nt, Artificial Sequence
  Synthetic sequence or sequence of unknown origin
guuguaguuccc

SEQ ID NO: 635 - RNA, 10 nt, Artificial Sequence
  Synthetic sequence or sequence of unknown origin
guuguaguuc

SEQ ID NO: 636 - RNA, 19 nt, Artificial Sequence
  Synthetic sequence or sequence of unknown origin
auuuucggguuacuaugau

SEQ ID NO: 637 - RNA, 15 nt, Artificial Sequence
  Synthetic sequence or sequence of unknown origin
ucggguuacuaugau

SEQ ID NO: 638 - RNA, 12 nt, Artificial Sequence
  Synthetic sequence or sequence of unknown origin
gguuacuaugau

SEQ ID NO: 639 - RNA, 10 nt, Artificial Sequence
  Synthetic sequence or sequence of unknown origin
uuacuaugau

SEQ ID NO: 640 - RNA, 14 nt, Artificial Sequence
  Synthetic sequence or sequence of unknown origin
aagguagaacaccg

SEQ ID NO: 641 - RNA, 11 nt, Artificial Sequence
  Synthetic sequence or sequence of unknown origin
gguagaacacc

SEQ ID NO: 642 - RNA, 44 nt, Artificial Sequence
  Synthetic sequence or sequence of unknown origin
aaaagcucuaacgccuugccauuuggugaggcguuaucuuuuuu

SEQ ID NO: 643 - RNA, 38 nt, Artificial Sequence
  Synthetic sequence or sequence of unknown origin
aaaagcucuaacgccuugccauuuggugaggcguuauc

SEQ ID NO: 644 - RNA, 100 nt, Artificial Sequence
  Synthetic sequence or sequence of unknown origin
guuguaguucccuguuaaugaaaauuuucggguuacuaugauaagguagaacaccgaaaagcucuaacgccuugccauuuggugaggcguuaucuuuuuu

SEQ ID NO: 645 - RNA, 100 nt, Artificial Sequence
  Synthetic sequence or sequence of unknown origin
guuguaguucccuguuaaugaaaauuaucggguuacuaugauaagguagaacaccgaaaagcucuaacgccuugccauuuggugaggcguuaucuuuuuu

SEQ ID NO: 646 - RNA, 19 nt, Artificial Sequence
  Synthetic sequence or sequence of unknown origin
auuaucggguuacuaugau

SEQ ID NO: 647 - RNA, 16 nt, Artificial Sequence
  Synthetic sequence or sequence of unknown origin
guuuuaguucucggac

SEQ ID NO: 648 - RNA, 15 nt, Artificial Sequence
  Synthetic sequence or sequence of unknown origin
guuuuaguucucgga

SEQ ID NO: 649 - RNA, 12 nt, Artificial Sequence
  Synthetic sequence or sequence of unknown origin
guuuuaguucuc

SEQ ID NO: 650 - RNA, 10 nt, Artificial Sequence
  Synthetic sequence or sequence of unknown origin
guuuuaguuc

SEQ ID NO: 651 - RNA, 17 nt, Artificial Sequence
  Synthetic sequence or sequence of unknown origin
guccgagaaucuaagau

SEQ ID NO: 652 - RNA, 16 nt, Artificial Sequence
  Synthetic sequence or sequence of unknown origin
uccgagaaucuaagau

SEQ ID NO: 653 - RNA, 13 nt, Artificial Sequence
  Synthetic sequence or sequence of unknown origin
gagaaucuaagau

SEQ ID NO: 654 - RNA, 11 nt, Artificial Sequence
  Synthetic sequence or sequence of unknown origin
gaaucuaagau

SEQ ID NO: 655 - RNA, 15 nt, Artificial Sequence
  Synthetic sequence or sequence of unknown origin
aaagcuauaugcugu

SEQ ID NO: 656 - RNA, 11 nt, Artificial Sequence
  Synthetic sequence or sequence of unknown origin
agcuauaugcu

SEQ ID NO: 657 - RNA, 30 nt, Artificial Sequence
  Synthetic sequence or sequence of unknown origin
gggguugcguauccccuuaucgaacguacu

SEQ ID NO: 658 - RNA, 26 nt, Artificial Sequence
  Synthetic sequence or sequence of unknown origin
aagaugaguuucggcucaucuuuuuu

SEQ ID NO: 659 - RNA, 20 nt, Artificial Sequence
  Synthetic sequence or sequence of unknown origin
aagaugaguuucggcucauc

SEQ ID NO: 660 - RNA, 108 nt, Artificial Sequence
  Synthetic sequence or sequence of unknown origin
guuuuaguucucggacgaaaguccgagaaucuaagauaaagcuauaugcugugggguugcguauccccuuaucgaacguacuaagaugaguuucggcucaucuuuuuu

SEQ ID NO: 661 - RNA, 108 nt, Artificial Sequence
  Synthetic sequence or sequence of unknown origin
gucuuaguucucggacgaaaguccgagaaucuaagauaaagcuauaugcugugggguugcguauccccuuaucgaacguacuaagaugaguuucggcucaucuuuuuu

SEQ ID NO: 662 - RNA, 16 nt, Artificial Sequence
  Synthetic sequence or sequence of unknown origin
gucuuaguucucggac

SEQ ID NO: 663 - RNA, 15 nt, Artificial Sequence
  Synthetic sequence or sequence of unknown origin
gucuuaguucucgga

SEQ ID NO: 664 - RNA, 12 nt, Artificial Sequence
  Synthetic sequence or sequence of unknown origin
gucuuaguucuc

SEQ ID NO: 665 - RNA, 10 nt, Artificial Sequence
  Synthetic sequence or sequence of unknown origin
gucuuaguuc

SEQ ID NO: 666 - RNA, 19 nt, Artificial Sequence
  Synthetic sequence or sequence of unknown origin
guuguaguucccuaauuau

SEQ ID NO: 667 - RNA, 15 nt, Artificial Sequence
  Synthetic sequence or sequence of unknown origin
guuguaguucccuaa

SEQ ID NO: 668 - RNA, 12 nt, Artificial Sequence
  Synthetic sequence or sequence of unknown origin
guuguaguuccc

SEQ ID NO: 669 - RNA, 10 nt, Artificial Sequence
  Synthetic sequence or sequence of unknown origin
guuguaguuc

SEQ ID NO: 670 - RNA, 19 nt, Artificial Sequence
  Synthetic sequence or sequence of unknown origin
acaauuagguuacuaugau

SEQ ID NO: 671 - RNA, 15 nt, Artificial Sequence
  Synthetic sequence or sequence of unknown origin
uuagguuacuaugau

SEQ ID NO: 672 - RNA, 12 nt, Artificial Sequence
  Synthetic sequence or sequence of unknown origin
gguuacuaugau

SEQ ID NO: 673 - RNA, 10 nt, Artificial Sequence
  Synthetic sequence or sequence of unknown origin
uuacuaugau

SEQ ID NO: 674 - RNA, 15 nt, Artificial Sequence
  Synthetic sequence or sequence of unknown origin
aagguaguauaccgc

SEQ ID NO: 675 - RNA, 11 nt, Artificial Sequence
  Synthetic sequence or sequence of unknown origin
gguaguauacc

SEQ ID NO: 676 - RNA, 44 nt, Artificial Sequence
  Synthetic sequence or sequence of unknown origin
aaagcucuaacgccucaucuuaaugauggggcguuaucuuuuuu

SEQ ID NO: 677 - RNA, 38 nt, Artificial Sequence
  Synthetic sequence or sequence of unknown origin
aaagcucuaacgccucaucuuaaugauggggcguuauc

SEQ ID NO: 678 - RNA, 101 nt, Artificial Sequence
  Synthetic sequence or sequence of unknown origin
guuguaguucccuaauuaugaaaacaauuagguuacuaugauaagguaguauaccgcaaagcucuaacgccucaucuuaaugauggggcguuaucuuuuuu

SEQ ID NO: 679 - RNA, 16 nt, Artificial Sequence
  Synthetic sequence or sequence of unknown origin
guuauuuugaauacua

SEQ ID NO: 680 - RNA, 15 nt, Artificial Sequence
  Synthetic sequence or sequence of unknown origin
guuauuuugaauacu

SEQ ID NO: 681 - RNA, 12 nt, Artificial Sequence
  Synthetic sequence or sequence of unknown origin
guuauuuugaau

SEQ ID NO: 682 - RNA, 10 nt, Artificial Sequence
  Synthetic sequence or sequence of unknown origin
guuauuuuga

SEQ ID NO: 683 - RNA, 15 nt, Artificial Sequence
  Synthetic sequence or sequence of unknown origin
guguauuuaaaguaa

SEQ ID NO: 684 - RNA, 14 nt, Artificial Sequence
  Synthetic sequence or sequence of unknown origin
uguauuuaaaguaa

SEQ ID NO: 685 - RNA, 11 nt, Artificial Sequence
  Synthetic sequence or sequence of unknown origin
auuuaaaguaa

SEQ ID NO: 686 - RNA, 51 nt, Artificial Sequence
  Synthetic sequence or sequence of unknown origin
auaaaaaguuaaauuuaaagauaaaaguaaauaauuaguaaauuaacuucu

SEQ ID NO: 687 - RNA, 26 nt, Artificial Sequence
  Synthetic sequence or sequence of unknown origin
gauaaugugaaauucauuuguuuuuu

SEQ ID NO: 688 - RNA, 20 nt, Artificial Sequence
  Synthetic sequence or sequence of unknown origin
gauaaugugaaauucauuug

SEQ ID NO: 689 - RNA, 112 nt, Artificial Sequence
  Synthetic sequence or sequence of unknown origin
guuauuuugaauacuagaaaguguauuuaaaguaaauaaaaaguuaaauuuaaagauaaaaguaaauaauuaguaaauuaacuucugauaaugugaaauucauuuguuuuuu

SEQ ID NO: 690 - RNA, 112 nt, Artificial Sequence
  Synthetic sequence or sequence of unknown origin
guuacuuugaauacuagaaaguguauuuaaaguaaauaaaaaguuaaauuuaaagauaaaaguaaauaauuaguaaauuaacuucugauaaugugaaauucauuuguuuuuu

SEQ ID NO: 691 - RNA, 16 nt, Artificial Sequence
  Synthetic sequence or sequence of unknown origin
guuacuuugaauacua

SEQ ID NO: 692 - RNA, 15 nt, Artificial Sequence
  Synthetic sequence or sequence of unknown origin
guuacuuugaauacu

SEQ ID NO: 693 - RNA, 12 nt, Artificial Sequence
  Synthetic sequence or sequence of unknown origin
guuacuuugaau

SEQ ID NO: 694 - RNA, 10 nt, Artificial Sequence
  Synthetic sequence or sequence of unknown origin
guuacuuuga

SEQ ID NO: 695 - RNA, 17 nt, Artificial Sequence
  Synthetic sequence or sequence of unknown origin
aagguauuaccuuaagc

SEQ ID NO: 696 - DNA, 5473 bp, Artificial Sequence
  Synthetic sequence or sequence of unknown origin
taatacgactcactatagggagaccacaacggtttccctctagagagacaataaccctgataatgcttcaataatattgaaaaaggaagagtatgcctaagaagaagagaaaggtgggtaccgaacagaagctgaactacgtcatcggcctggacatcggcatcggatctgttggatgggccgccatcaacctggacaagcggagaattgaagagtccggcgtgcggctgtttgatagcggagaagtgctggaccagaacaagcggaagagaaccagccagcagcggagaggctacagatccacaagacggctcgttcggagaagggcccacagaaccgaaagaatgaagcagtggctggaaaagatcggactggtgtctgccgagacactggccgagtattatgaggcccctaccgctcatcccctggaactgagagttagaggcctgacagaaaagctggcccctgctgaacttgccgccgctctgctgcacattggcaagcacagaggcttcaacgagttctaccagctggacgaggaagagaagaagtccctgtccaaagaggaaaaagaggatcggtccagagccgaggcctacgagagactgattcaagtgatgcctggcatggccccagctcagctgtatctgtctcaccccatgttcatgagcgagtttggcgtgcggtacagaaacaccaagaagcaggacgagagcaagaaagtgctggtgccccggaccgagatcgagaaagagacacacagaatctgcgagaagcaggcctctttctacccctgcctgaccgagcagaacagagagaagatctacgagatcctgttccggcagcgggactttgaggatggccctggcgatcccaacgacgagacaagacagtacaagggcttcctggacaccatcggcaactgcagattctaccccgagctgaagagaggcgccagacagtctgtgctgggcgatctgttcgtgctgatcaaccggctgagccagaaccggtactttagcgccgaaacaggcgaggtggtggatagcgccgatgcctacagggaaatcatcgagacagctctgctgaacggcagcctggaaatgaaggaagtgggcaagatcctgaagaactacgggatcgagatgctgaacgccaacgaggaaaaggccgactctcccaatcggtgcctggccttcatcagaatgatcaagcccatcctggaaaacaacggctacgactgggacgccgtgatcagagctgagtaccccttcacaccctacaacgaggacagcttcctgaacagagtgggaaagattctgagcgagaacagaacccctcagagaagagtggacctgctgaagaaagctggcgtgtccgagggaattgccgacgcactggccaagagaaagacaggcggaaccgtgtccgtgtccgaccggtatatgctggaaagcgtggaagccttcatgaacggcgagctgttcggcaactacaacgccagaagagaaaaggatctgctggcccaagtgcggaccggcaagaagtataagaagctgcctcctatcgagaagggcgactacgtggacaaccccgtggtgttcagatccatcaacgagacacggaaggtgctgaatgccatcattgagaagtacggcagccccaacgccatcaatatcgagatcgccgccgacctgagccggacctttctggaaagggacctgatgcggctcgagaacaacagaaaccggatcgaaaccgagcgcatccagaagaagattgccgagctgctgcataccaaggacgagatcatgcccgtgcaggtcgagagatatagactgggcgagcagcaaggctggaagtgcccttattgtggcgcccctatcaccatggaaaccgccatccagaaagacgagcggagctatgagatcgaccacatcgtgccctacagcctgatcctggacaacacccagcacaacaaggtgctggtccaccacggctgtaatcaggccaagggacagagaaccccactgatgtacctgagcgctgacgccgccaagaaaaaagagttcatcaaatgggtcaacgccgcctacgccaaaaagcagatcagcaagcgcaagagagagtacctgctgcagcccgacctgaacgacgagcagatgcaagagtggaaaacccggaacctgaatgacacccggtatatcgccaagtacctcgtgcggtatctgaacgacaacctgctgttcgacagcgaagaaaagaacaacgtgtacgccgtgaagggcgccatcacaagccagctgagaagagtctggctgaacaaggacacctggggaggcgacgataagagcgagctgagaaaagagagcaacctgcaccacgccgtggatgccgtggttatcgctaattgcatgcccggctacatcgagctggccgaagaagccctgagactgcggagaatgtaccacgaggaaggcaagcgggaaaccgagaattggaccgccgtgctgaacaatgccgtggaccggctgtaccgctactacagaatgcctaaggcctacgccgaacagatgctgcggaacatcaagagaatccccagcttcatccccgacctgtctgaggaagtggacgccagattttgcgactgcggcctggaaaatgagaagcagtacagaagcaagctgcgggccttctacgccgatgatctggcctttgccgccggaatcagaatgcccctggtgtcctacaagcccaacagaaaggccacaggcaagatcaccgccgataaggccgtgaagaagggcacatctcagagcctgctggtcaagaaaatcgccgaggacaataccaccacactggacgatgccagctactactgcaccgaggtgtacagaaagaaggacggcacactgggcctgagaggcatcagatactccatgctgaaacgcgacaacgggaagatcatcctgaatgagcagcctccagagaactacgccgtgcacatcatgtacctgttcaagaacgactacctccggatctacgacaagaacaacaagatcaagttcgagggctactacctcagcgtgtacgacatgaaggcccagagaatctacaccgccgaccggatcaagggcagaaacgagaagtctgtgggcatcctgaaaaatgaccgggtcgagaagctggatgtgtccatcctgggagatctcggcggaatccagagctgtggcaagcctttcctgagcgaagtgacccggtctggatcctacccatacgatgttccagattacgcggccgctccaaaaaagaaaagaaaagttgcggctagccatcatcaccatcaccatcatcattaaggctgctaacaaagcccgaaaggaagctgagttggctgctgccaccgctgagcaataactagcataaccccttggggcctctaaacgggtcttgaggggttttttgctgaaaggaggaactatatccggatatccacaggacgggtgtggtcgccatgatcgcgtagtcgatagtggctccaagtagcgaagcgagcaggactgggcggcggccaaagcggtcggacagtgctccgagaacgggtgcgcatagaaattgcatcaacgcatatagcgctagcagcacgccatagtgactggcgatgctgtcggaatggacgatatcccgcaagaggcccggcagtaccggcataaccaagcctatgcctacagcatccagggtgacggtgccgaggatgacgatgagcgcattgttagatttcatacacggtgcctgactgcgttagcaatttaactgtgataaactaccgcattaaagcttatcgatgataagctgtcaaacatgagaattcttagaaaaactcatcgagcatcaaatgaaactgcaatttattcatatcaggattatcaataccatatttttgaaaaagccgtttctgtaatgaaggagaaaactcaccgaggcagttccataggatggcaagatcctggtatcggtctgcgattccgactcgtccaacatcaatacaacctattaatttcccctcgtcaaaaataaggttatcaagtgagaaatcaccatgagtgacgactgaatccggtgagaatggcaaaagcttatgcatttctttccagacttgttcaacaggccagccattacgctcgtcatcaaaatcactcgcatcaaccaaaccgttattcattcgtgattgcgcctgagcgagacgaaatacgcgatcgctgttaaaaggacaattacaaacaggaatcgaatgcaaccggcgcaggaacactgccagcgcatcaacaatattttcacctgaatcaggatattcttctaatacctggaatgctgttttcccggggatcgcagtggtgagtaaccatgcatcatcaggagtacggataaaatgcttgatggtcggaagaggcataaattccgtcagccagtttagtctgaccatctcatctgtaacatcattggcaacgctacctttgccatgtttcagaaacaactctggcgcatcgggcttcccatacaatcgatagattgtcgcacctgattgcccgacattatcgcgagcccatttatacccatataaatcagcatccatgttggaatttaatcgcggcctcgagcaagacgtttcccgttgaatatggctcataacaccccttgtattactgtttatgtaagcagacagttttattgttcatgaccaaaatcccttaacgtgagttttcgttccactgagcgtcagaccccgtagaaaagatcaaaggatcttcttgagatcctttttttctgcgcgtaatctgctgcttgcaaacaaaaaaaccaccgctaccagcggtggtttgtttgccggatcaagagctaccaactctttttccgaaggtaactggcttcagcagagcgcagataccaaatactgtccttctagtgtagccgtagttaggccaccacttcaagaactctgtagcaccgcctacatacctcgctctgctaatcctgttaccagtggctgctgccagtggcgataagtcgtgtcttaccgggttggactcaagacgatagttaccggataaggcgcagcggtcgggctgaacggggggttcgtgcacacagcccagcttggagcgaacgacctacaccgaactgagatacctacagcgtgagctatgagaaagcgccacgcttcccgaagggagaaaggcggacaggtatccggtaagcggcagggtcggaacaggagagcgcacgagggagcttccagggggaaacgcctggtatctttatagtcctgtcgggtttcgccacctctgacttgagcgtcgatttttgtgatgctcgtcaggggggcggagcctatggaaaaacgccagcaacgcggcctttttacggttcctggccttttgctggccttttgctcacatgttcgatcccgcgaaat

SEQ ID NO: 697 - DNA, 2816 bp, Artificial Sequence
  Synthetic sequence or sequence of unknown origin
tacacggtgcctgactgcgttagcaatttaactgtgataaactaccgcattaaagcttatcgatgataagctgtcaacacatttccccgaaaagtgccacctgacgtcctcgagtcccgcataatcgaaatgagggcctatttcccatgattccttcatatttgcatatacgatacaaggctgttagagagataattagaattaatttgactgtaaacacaaagatattagtacaaaatacgtgacgtagaaagtaataatttcttgggtagtttgcagttttaaaattatgttttaaaatggactatcatatgcttaccgtaacttgaaagtatttcgatttcttggctttatatatcttgctaatacgactcactataggaagagcagagccttggtctcgttttgggcctctgatgggaaaccatcagagacctgagataaggctttatgccgtagggtatggcggtaacccggagtattccgaatccgctttttctttgcctgtaaatacagtataacatattatttcgtccttttttgaattctctagcataaccccttggggcctctaaacgggtcttgaggggttttttgacctaggctaggggatatattccgggtaccccgcttcctcgctcactgactcgctacgctcggtcgttcgactgcggcgagcggaaatggcttacgaacggggcggagatttcctggaagatgccaggaagatacttaacagggaagtgagagggccgcggcaaagccgtttttccataggctccgcccccctgacaagcatcacgaaatctgacgctcaaatcagtggtggcgaaacccgacaggactataaagataccaggcgtttccccctggcggctccctcgtgcgctctcctgttcctgcctttcggtttaccggtgtcattccgctgttatggccgcgtttgtctcattccacgcctgacactcagttccgggtaggcagttcgctccaagctggactgtatgcacgaaccccccgttcagtccgaccgctgcgccttatccggtaactatcgtcttgagtccaacccggaaagacatgcaaaagcaccactggcagcagccactggtaattgatttagaggagttagtcttgaagtcatgcgccggttaaggctaaactgaaaggacaagttttggtgactgcgctcctccaagccagttacctcggttcaaagagttggtagctcagagaaccttcgaaaaaccgccctgcaaggcggttttttcgttttcagagcaagagattacgcgcagaccaaaacgatctcaagaagatcatcttattaatcagataaaatatttctagatttcagtgcaatttatctcttcaaatgtagcacctgaagtcagccccatacgatataagttgttactagtgcttggattctcaccaataaaaaacgcccggcggcaaccgagcgttctgaacaaatccagatggagttctgaggtcattactggatctatcaacaggagtccaagcgagaagggttggtttgcgcattcacagttctccgcaagaattgattggctccaattcttggagtggtgaatccgttagcgaggtgccgccggcttccattcaggtcgaggtggcccggctccatgcaccgcgacgcaacgcggggaggcagacaaggtatagggcggcgcctacaatccatgccaacccgttccatgtgctcgccgaggcggcataaatcgccgtgacgatcagcggtccaatgatcgaagttaggctggtaagagccgcgagcgatccttgaagctgtccctgatggtcgtcatctacctgcctggacagcatggcctgcaacgcgggcatcccgatgccgccggaagcgagaagaatcataatggggaaggccatccagcctcgcgtcgcgaacgccagcaagacgtagcccagcgcgtcggccgccatgccggcgataatggcctgcttctcgccgaaacgtttggtggcgggaccagtgacgaaggcttgagcgagggcgtgcaagattccgaataccgcaagcgacaggccgatcatcgtcgcgctccagcgaaagcggtcctcgccgaaaatgacccagagcgctgccggcacctgtcctacgagttgcatgataaagaagacagtcataagtgcggcgacgatagtcatgccccgcgcccaccggaaggagctgactgggttgaaggctctcaagggcatcggtcgacgctctcccttatgcgactcctgcattaggaagcagcccagtagtaggttgaggccgttgagcaccgccgccgcaaggaatggtgcatgcaaggagatggcgcccaacagtcccccggccacggggcctgccaccatacccacgccgaaacaagcgctcatgagcccgaagtggcgagcccgatcttccccatcggtgatgtcggcgatataggcgccagcaaccgcacctgtggcgccggtgatgccggccacgatgcgtccggcgtagaggatccacaggacgggtgtggtcgccatgatcgcgtagtcgatagtggctccaagtagcgaagcgagcaggactgggcggcggccaaagcggtcggacagtgctccgagaacgggtgcgcatagaaattgcatcaacgcatatagcgctagcagcacgccatagtgactggcgatgctgtcggaatggacgatatcccgcaagaggcccggcagtaccggcataaccaagcctatgcctacagcatccagggtgacggtgccgaggatgacgatgagcgcattgttagatttca

SEQ ID NO: 698 - DNA, 5009 bp, Artificial Sequence
  Synthetic sequence or sequence of unknown origin
  misc_feature (3040)..(3047): n is a, c, g, or t
tcgagtctttacactttatgcttccggctcgtatgttgtgtggaattgtgagcggataacaatttcacacatgattacggattcaacgtcgtgactggtaaaacccgggcgttacccaacttaatcgccttgcagcacatccccctttcgccagcaggcgtaataaggaaaggattcatgtactatttgaaaaacacaaacttttggatgttcggtttattctttttcttttacttttttatcatgggagcctacttcccgtttttcccgatttggctacatgatatcaaccatatcagcaaaagtgatacgggtattatttttgccgctatttctctgttctcgctattattccaaccgctgtttggtctgctttctgacaaactcggtctacgcaaatacctgctgtggattattaccggcatgttagtgatgtttgcgccgttctttatttttatcttcgggccactgctgcagtacaacattttagtagggtcgattgttggtggtatttatctaggctttagttttaacgccggtgcgccagcagtagaggcatttattgagaaagtcagccggcgcagtaatttcgaatttggtcgcgcgcggatgtttggcagtgttggctgggcgctggttgcctcgattgtcgggatcatgttcaccattaataatcagtttgttttctggctgggctctggcagttgtctcatcctcgccgttttactctttttcgccaaaacggacgcgccctcaagtgccacggttgccaatgcggtaggtgccaaccattcggcatttagccttaagctggcactggaactgttcagacagccaaaactgtggtttttgtcactgtatgttattggcgtttcctccacctacgatgtttttgaccaacagtttgctaatttctttacttcgttctttgctaccggtgaacagggtacccgcgtatttggctacgtaacgacaatgggcgaattacttaacgcctcgattatgttctttgcgccactgatcattaatcgcatcggtgggaagaatgccctgctgctggctggcactattatgtctgtacgtattattggctcatcgttcgccacctcagcgctggaagtggttattctgaaaacgctgcatatgtttgaagtaccgttcctgctggtgggctcctttaaatatattactagtcagtttgaagtgcgtttttcagcgacgatttatctggtcagtttcagcttctttaagcaactggcgatgatttttatgtctgtactggcgggcaatatgtatgaaagcataggtttccaaggcgcttatctggtgctgggtctggtggcgctgggcttcaccttaatttccgtgttcacgcttagcggcccgggcccgctttccctgctgcgtcgtcaggtgaatgaagtcgcttaaaggcctcgatgcagctagcatgctaatctgattcgttaccaattatgacaacttgacggctacatcattcactttttcttcacaaccggcacggaactcgctcgggctggccccggtgcattttttaaatacccgcgagaaatagagttgatcgtcaaaaccaacattgcgaccgacggtggcgataggcatccgggtggtgctcaaaagcagcttcgcctggctgatacgttggtcctcgcgccagcttaagacgctaatccctaactgctggcggaaaagatgtgacagacgcgacggcgacaagcaaacatgctgtgcgacgctggcgatatcaaaattgctgtctgccaggtgatcgctgatgtactgacaagcctcgcgtacccgattatccatcggtggatggagcgactcgttaatcgcttccatgcgccgcagtaacaattgctcaagcagatttatcgccagcagctccgaatagcgcccttccccttgcccggcgttaatgatttgcccaaacaggtcgctgaaatgcggctggtgcgcttcatccgggcgaaagaaccccgtattggcaaatattgacggccagttaagccattcatgccagtaggcgcgcggacgaaagtaaacccactggtgataccattcgcgagcctccggatgacgaccgtagtgatgaatctctcctggcgggaacagcaaaatatcacccggtcggcaaacaaattctcgtccctgatttttcaccaccccctgaccgcgaatggtgagattgagaatataacctttcattcccagcggtcggtcgataaaaaaatcgagataaccgttggcctcaatcggcgttaaacccgccaccagatgggcattaaacgagtatcccggcagcaggggatcattttgcgcttcagccatacttttcatactcccgccattcagagaagaaaccaattgtccatattgcatcagacattgccgtcactgcgtcttttactggctcttctcgctaaccaaaccggtaaccccgcttattaaaagcattctgtaacaaagcgggaccaaagccatgacaaaaacgcgtaacaaaagtgtctataatcacggcagaaaagtccacattgattatttgcacggcgtcacactttgctatgccatagcatttttatccataagattagcggatcctacctgacgctttttatcgcaactctctactgtttctccatacccgtttttttggggtagcgattgaaaacgatgcagtttaaggtttacacctataaaagagagagccgttatcgtctgtttgtggatgtacagagtgatattattgacacgcccgggcgacggatggtgatccccctggccagtgcacgtctgctgtcagataaagtctcccgtgaactttacccggtggtgcatatcggggatgaaagctggcgcatgatgaccaccgatatggccagtgtgccggtctccgttatcggggaagaagtggctgatctcagccaccgcgaaaatgacatcaaaaacgccattaacctgatgttttggggaatataatcttctagacatacaatggaagagcagagccttggtctcnnnnnnnnaagcttgatatcgaattcctgcagcccgggggatcccatggtacgcgtgctagaggcatcaaataaaacgaaaggctcagtcgaaagactgggcctttcgttttatctgttgtttgtcggtgaacgctctcctgagtaggacaaatccgccgccctagacctaggcgttcggctgcggcgagcggtatcagctcactcaaaggcggtaatacggttatccacagaatcaggggataacgcaggaaagaacatgtgagcaaaaggccagcaaaaggccaggaaccgtaaaaaggccgcgttgctggcgtttttccataggctccgcccccctgacgagcatcacaaaaatcgacgctcaagtcagaggtggcgaaacccgacaggactataaagataccaggcgtttccccctggaagctccctcgtgcgctctcctgttccgaccctgccgcttaccggatacctgtccgcctttctcccttcgggaagcgtggcgctttctcaatgctcacgctgtaggtatctcagttcggtgtaggtcgttcgctccaagctgggctgtgtgcacgaaccccccgttcagcccgaccgctgcgccttatccggtaactatcgtcttgagtccaacccggtaagacacgacttatcgccactggcagcagccactggtaacaggattagcagagcgaggtatgtaggcggtgctacagagttcttgaagtggtggcctaactacggctacactagaaggacagtatttggtatctgcgctctgctgaagccagttaccttcggaaaaagagttggtagctcttgatccggcaaacaaaccaccgctggtagcggtggtttttttgtttgcaagcagcagattacgcgcagaaaaaaaggatctcaagaagatcctttgatcttttctacggggtctgacgctcagtggaacgaaaactcacgttaagggattttggtcatgactagtgcttggattctcaccaataaaaaacgcccggcggcaaccgagcgttctgaacaaatccagatggagttctgaggtcattactggatctatcaacaggagtccaagcgagctcgatatcaaattacgccccgccctgccactcatcgcagtactgttgtaattcattaagcattctgccgacatggaagccatcacagacggcatgatgaacctgaatcgccagcggcatcagcaccttgtcgccttgcgtataatatttgcccatggtgaaaacgggggcgaagaagttgtccatattggccacgtttaaatcaaaactggtgaaactcacccagggattggctgagacgaaaaacatattctcaataaaccctttagggaaataggccaggttttcaccgtaacacgccacatcttgcgaatatatgtgtagaaactgccggaaatcgtcgtggtattcactccagagcgatgaaaacgtttcagtttgctcatggaaaacggtgtaacaagggtgaacactatcccatatcaccagctcaccgtctttcattgccatacggaattccggatgagcattcatcaggcgggcaagaatgtgaataaaggccggataaaacttgtgcttatttttctttacggtctttaaaaaggccgtaatatccagctgaacggtctggttataggtacattgagcaactgactgaaatgcctcaaaatgttctttacgatgccattgggatatatcaacggtggtatatccagtgatttttttctccattttagcttccttagctcctgaaaatctcgataactcaaaaaatacgcccggtagtgatcttatttcattatggtgaaagttggaacctcttacgtgccgatcaacgtctcattttcgccagatatcgacgtctaagaaaccattattatcatgacattaacctataaaaataggcgtatcacgaggccctttcgtcttcacc

SEQ ID NO: 699 - protein, 9 aa, Artificial Sequence
  Synthetic sequence or sequence of unknown origin
YPYDVPDYA

SEQ ID NO: 700 - DNA, 27 bp, Artificial Sequence
  Synthetic sequence or sequence of unknown origin
tacccatacgatgttccagattacgct

SEQ ID NO: 701 - protein, 7 aa, Artificial Sequence
  Synthetic sequence or sequence of unknown origin
PKKKRKV

SEQ ID NO: 702 - DNA, 21 bp, Artificial Sequence
  Synthetic sequence or sequence of unknown origin
ccaaaaaagaaaagaaaagtt

SEQ ID NO: 703 - protein, 19 aa, Artificial Sequence
  Synthetic sequence or sequence of unknown origin
ATNFSLLKQAGDVEENPGP

SEQ ID NO: 704 - DNA, 57 bp, Artificial Sequence
  Synthetic sequence or sequence of unknown origin
gccaccaacttcagcctgctgaagcaggccggcgacgtggaggagaaccccggcccc

SEQ ID NO: 705 - protein, 236 aa, Artificial Sequence
  Synthetic sequence or sequence of unknown origin
MVSKGEEDNMAIIKEFMRFKVHMEGSVNGHEFEIEGEGEGRPYEGTQTAKLKVTKGGPLPFAWDILSPQFMYGSKAYVKHPADIPDYLKLSFPEGFKWERVMNFEDGGVVTVTQDSSLQDGEFIYKVKLRGTNFPSDGPVMQKKTMGWEASSERMYPEDGALKGEIKQRLKLKDGGHYDAEVKTTYKAKKPVQLPGAYNVNIKLDITSHNEDYTIVEQYERAEGRHSTGGMDELYK

SEQ ID NO: 706 - DNA, 711 bp, Artificial Sequence
  Synthetic sequence or sequence of unknown origin
atggtgagcaagggcgaggaggataacatggccatcatcaaggagttcatgcgcttcaaggtgcacatggagggctccgtgaacggccacgagttcgagatcgagggcgagggcgagggccgcccctacgagggcacccagaccgccaagctgaaggtgaccaagggtggccccctgcccttcgcctgggacatcctgtcccctcagttcatgtacggctccaaggcctacgtgaagcaccccgccgacatccccgactacttgaagctgtccttccccgagggcttcaagtgggagcgcgtgatgaacttcgaggacggcggcgtggtgaccgtgacccaggactcctccctgcaggacggcgagttcatctacaaggtgaagctgcgcggcaccaacttcccctccgacggccccgtaatgcagaagaagaccatgggctgggaggcctcctccgagcggatgtaccccgaggacggcgccctgaagggcgagatcaagcagaggctgaagctgaaggacggcggccactacgacgctgaggtcaagaccacctacaaggccaagaagcccgtgcagctgcccggcgcctacaacgtcaacatcaagttggacatcacctcccacaacgaggactacaccatcgtggaacagtacgaacgcgccgagggccgccactccaccggcggcatggacgagctgtacaagtag

SEQ ID NO: 707 - RNA, 22 nt, Artificial Sequence
  Synthetic sequence or sequence of unknown origin
gcagggcuggggagaagguggg

SEQ ID NO: 708 - RNA, 22 nt, Artificial Sequence
  Synthetic sequence or sequence of unknown origin
ggccacuuucaggaggaggauu

SEQ ID NO: 709 - RNA, 22 nt, Artificial Sequence
  Synthetic sequence or sequence of unknown origin
gcgucgcgcuggcgggcauucc

SEQ ID NO: 710 - RNA, 22 nt, Artificial Sequence
  Synthetic sequence or sequence of unknown origin
cuucugggcaguugaugccgug

SEQ ID NO: 711 - RNA, 22 nt, Artificial Sequence
  Synthetic sequence or sequence of unknown origin
cuucugggcaguugaugccgug

SEQ ID NO: 712 - RNA, 22 nt, Artificial Sequence
  Synthetic sequence or sequence of unknown origin
acgaagcucuccgauguguugg

SEQ ID NO: 713 - RNA, 22 nt, Artificial Sequence
  Synthetic sequence or sequence of unknown origin
ucaagcuggucgagaaaagcuu

SEQ ID NO: 714 - RNA, 22 nt, Artificial Sequence
  Synthetic sequence or sequence of unknown origin
uggaugaaacccagacacauag

SEQ ID NO: 715 - RNA, 22 nt, Artificial Sequence
  Synthetic sequence or sequence of unknown origin
uguuuaugcauagauaaucucu

SEQ ID NO: 716 - RNA, 22 nt, Artificial Sequence
  Synthetic sequence or sequence of unknown origin
uggaucccugcccuccugcuga

SEQ ID NO: 717 - RNA, 22 nt, Artificial Sequence
  Synthetic sequence or sequence of unknown origin
uuacucugaagcccauauauca

SEQ ID NO: 718 - RNA, 22 nt, Artificial Sequence
  Synthetic sequence or sequence of unknown origin
cugccuacugauauacgggcuu

SEQ ID NO: 719 - RNA, 22 nt, Artificial Sequence
  Synthetic sequence or sequence of unknown origin
cugccuacugauauaugggcuu

SEQ ID NO: 720 - RNA, 22 nt, Artificial Sequence
  Synthetic sequence or sequence of unknown origin
cagggcuggggagaaggugggg

SEQ ID NO: 721 - RNA, 22 nt, Artificial Sequence
  Synthetic sequence or sequence of unknown origin
gccagaaagagagaguagcgcg

SEQ ID NO: 722 - RNA, 22 nt, Artificial Sequence
  Synthetic sequence or sequence of unknown origin
cuggagugaaaacuugaagacu

SEQ ID NO: 723 - RNA, 22 nt, Artificial Sequence
  Synthetic sequence or sequence of unknown origin
agccccagaggccacagggaca

SEQ ID NO: 724 - RNA, 22 nt, Artificial Sequence
  Synthetic sequence or sequence of unknown origin
gugucaagccccagaggccaca

SEQ ID NO: 725 - RNA, 22 nt, Artificial Sequence
  Synthetic sequence or sequence of unknown origin
aacacaucggagagcuucgugc

SEQ ID NO: 726 - RNA, 22 nt, Artificial Sequence
  Synthetic sequence or sequence of unknown origin
cugaguuuguaucugccacuag

SEQ ID NO: 727 - RNA, 22 nt, Artificial Sequence
  Synthetic sequence or sequence of unknown origin
caauggugggacaagcauacga

SEQ ID NO: 728 - RNA, 22 nt, Artificial Sequence
  Synthetic sequence or sequence of unknown origin
aggaacaaagagccuuuggugc

SEQ ID NO: 729 - RNA, 22 nt, Artificial Sequence
  Synthetic sequence or sequence of unknown origin
gcauucuagagccuggaauuua

SEQ ID NO: 730 - RNA, 22 nt, Artificial Sequence
  Synthetic sequence or sequence of unknown origin
aaacagaacaccaaaaaaaucc

SEQ ID NO: 731 - RNA, 22 nt, Artificial Sequence
  Synthetic sequence or sequence of unknown origin
gacccugccguguaccagcuga

SEQ ID NO: 732 - RNA, 22 nt, Artificial Sequence
  Synthetic sequence or sequence of unknown origin
ucaaaaucggugaauaggcaga

SEQ ID NO: 733 - RNA, 22 nt, Artificial Sequence
  Synthetic sequence or sequence of unknown origin
uccucuugucccacagauaucc

SEQ ID NO: 734 - RNA, 22 nt, Artificial Sequence
  Synthetic sequence or sequence of unknown origin
agccgcagcgucaugagcagau

SEQ ID NO: 735 - RNA, 22 nt, Artificial Sequence
  Synthetic sequence or sequence of unknown origin
agcucuccuuggaacccauucc

SEQ ID NO: 736 - RNA, 22 nt, Artificial Sequence
  Synthetic sequence or sequence of unknown origin
caagucugucugccuauucacc

SEQ ID NO: 737 - RNA, 22 nt, Artificial Sequence
  Synthetic sequence or sequence of unknown origin
ucaugagcagauuaaacccggc

SEQ ID NO: 738 - RNA, 22 nt, Artificial Sequence
  Synthetic sequence or sequence of unknown origin
ccacaugagcguggucagggcc

SEQ ID NO: 739 - RNA, 22 nt, Artificial Sequence
  Synthetic sequence or sequence of unknown origin
aacacaucggagagcuucgugc

SEQ ID NO: 740 - RNA, 22 nt, Artificial Sequence
  Synthetic sequence or sequence of unknown origin
gacccugccguguaccagcuga

SEQ ID NO: 741 - RNA, 22 nt, Artificial Sequence
  Synthetic sequence or sequence of unknown origin
aagacaccuucuuccccagccc

SEQ ID NO: 742 - RNA, 22 nt, Artificial Sequence
  Synthetic sequence or sequence of unknown origin
agggcuggggagaagguggggg

SEQ ID NO: 743 - RNA, 22 nt, Artificial Sequence
  Synthetic sequence or sequence of unknown origin
cucgcagaguccggaaacagau

SEQ ID NO: 744 - RNA, 22 nt, Artificial Sequence
  Synthetic sequence or sequence of unknown origin
aaggaagggauccagacucgga

SEQ ID NO: 745 - RNA, 22 nt, Artificial Sequence
  Synthetic sequence or sequence of unknown origin
gcuccuggcuguggugggcagg

SEQ ID NO: 746 - RNA, 22 nt, Artificial Sequence
  Synthetic sequence or sequence of unknown origin
aagcccauauaucaguaggcag

SEQ ID NO: 747 - RNA, 22 nt, Artificial Sequence
  Synthetic sequence or sequence of unknown origin
acuucugucuacgcuacagaug

SEQ ID NO: 748 - RNA, 22 nt, Artificial Sequence
  Synthetic sequence or sequence of unknown origin
aagcccguauaucaguaggcag

SEQ ID NO: 749 - RNA, 22 nt, Artificial Sequence
  Synthetic sequence or sequence of unknown origin
gccacuuucaggaggaggauuc

SEQ ID NO: 750 - RNA, 22 nt, Artificial Sequence
  Synthetic sequence or sequence of unknown origin
auccagaacccugacccugccg

SEQ ID NO: 751 - RNA, 22 nt, Artificial Sequence
  Synthetic sequence or sequence of unknown origin
gccguguaccagcugagagacu

SEQ ID NO: 752 - RNA, 22 nt, Artificial Sequence
  Synthetic sequence or sequence of unknown origin
ggucacauuacucugaagccca

SEQ ID NO: 753 - RNA, 22 nt, Artificial Sequence
  Synthetic sequence or sequence of unknown origin
auccagaacccugacccugccg

SEQ ID NO: 754 - RNA, 22 nt, Artificial Sequence
  Synthetic sequence or sequence of unknown origin
acucgcagaguccggaaacaga

SEQ ID NO: 755 - RNA, 22 nt, Artificial Sequence
  Synthetic sequence or sequence of unknown origin
gauccagacucggaaccggaag

SEQ ID NO: 756 - RNA, 22 nt, Artificial Sequence
  Synthetic sequence or sequence of unknown origin
acucugguggggcugcuccagg

SEQ ID NO: 757 - RNA, 22 nt, Artificial Sequence
  Synthetic sequence or sequence of unknown origin
aucucuugggucauccacagag

SEQ ID NO: 758 - RNA, 22 nt, Artificial Sequence
  Synthetic sequence or sequence of unknown origin
guaccagcugagagacucuaaa

SEQ ID NO: 759 - RNA, 22 nt, Artificial Sequence
  Synthetic sequence or sequence of unknown origin
cccacagagguaggugccgcug

SEQ ID NO: 760 - RNA, 22 nt, Artificial Sequence
  Synthetic sequence or sequence of unknown origin
gauagccuccaggccagaaaga

SEQ ID NO: 761 - RNA, 22 nt, Artificial Sequence
  Synthetic sequence or sequence of unknown origin
cggcaucaacugcccagaaggg

SEQ ID NO: 762 - RNA, 22 nt, Artificial Sequence
  Synthetic sequence or sequence of unknown origin
cguaggaugucccucucccgag

SEQ ID NO: 763 - RNA, 22 nt, Artificial Sequence
  Synthetic sequence or sequence of unknown origin
aagagagccugcgggcagagcu

SEQ ID NO: 764 - RNA, 22 nt, Artificial Sequence
  Synthetic sequence or sequence of unknown origin
cugccuacugauauaugggcuu

SEQ ID NO: 765 - RNA, 22 nt, Artificial Sequence
  Synthetic sequence or sequence of unknown origin
gagucucucagcugguacacgg

SEQ ID NO: 766 - RNA, 22 nt, Artificial Sequence
  Synthetic sequence or sequence of unknown origin
caccucagcuggaccacagccg

SEQ ID NO: 767 - RNA, 22 nt, Artificial Sequence
  Synthetic sequence or sequence of unknown origin
gauauccagaacccugacccug

SEQ ID NO: 768 - RNA, 22 nt, Artificial Sequence
  Synthetic sequence or sequence of unknown origin
cucagcuggaccacagccgcag

SEQ ID NO: 769 - RNA, 22 nt, Artificial Sequence
  Synthetic sequence or sequence of unknown origin
gcauuccugaagcugacagcau

SEQ ID NO: 770 - RNA, 22 nt, Artificial Sequence
  Synthetic sequence or sequence of unknown origin
aauuuccugaauugcuaugugu

SEQ ID NO: 771 - RNA, 22 nt, Artificial Sequence
  Synthetic sequence or sequence of unknown origin
aaacagaguugaggucuguuua

SEQ ID NO: 772 - RNA, 22 nt, Artificial Sequence
  Synthetic sequence or sequence of unknown origin
guagcguagacagaagucacuu

SEQ ID NO: 773 - RNA, 22 nt, Artificial Sequence
  Synthetic sequence or sequence of unknown origin
ugcaagaccaugacugcaagga

SEQ ID NO: 774 - RNA, 22 nt, Artificial Sequence
  Synthetic sequence or sequence of unknown origin
gcugugcugaccaucgacgaga

SEQ ID NO: 775 - RNA, 22 nt, Artificial Sequence
  Synthetic sequence or sequence of unknown origin
accaaagcugcccuuaccuggg

SEQ ID NO: 776 - RNA, 22 nt, Artificial Sequence
  Synthetic sequence or sequence of unknown origin
cucagcugguacacggcagggu

SEQ ID NO: 777 - RNA, 22 nt, Artificial Sequence
  Synthetic sequence or sequence of unknown origin
cgaauccuccuccugaaagugg

SEQ ID NO: 778 - RNA, 22 nt, Artificial Sequence
  Synthetic sequence or sequence of unknown origin
gagucucucagcugguacacgg

SEQ ID NO: 779 - RNA, 22 nt, Artificial Sequence
  Synthetic sequence or sequence of unknown origin
aagacaccuucuuccccagccc

SEQ ID NO: 780 - RNA, 22 nt, Artificial Sequence
  Synthetic sequence or sequence of unknown origin
agcucuccuuggaacccauucc

SEQ ID NO: 781 - RNA, 22 nt, Artificial Sequence
  Synthetic sequence or sequence of unknown origin
gcacaguggggauguguggaaa

SEQ ID NO: 782 - RNA, 22 nt, Artificial Sequence
  Synthetic sequence or sequence of unknown origin
gccguguaccagcugagagacu

SEQ ID NO: 783 - RNA, 22 nt, Artificial Sequence
  Synthetic sequence or sequence of unknown origin
guaccgcaugagccccagcaac

SEQ ID NO: 784 - RNA, 22 nt, Artificial Sequence
  Synthetic sequence or sequence of unknown origin
guguggaaaaaaaaugaaguca

SEQ ID NO: 785 - RNA, 22 nt, Artificial Sequence
  Synthetic sequence or sequence of unknown origin
gacccugccguguaccagcuga

SEQ ID NO: 786 - RNA, 25 nt, Artificial Sequence
  Synthetic sequence or sequence of unknown origin
ggcaccaaagcugcccuuaccuggg

SEQ ID NO: 787 - RNA, 24 nt, Artificial Sequence
  Synthetic sequence or sequence of unknown origin
gcaccaaagcugcccuuaccuggg

SEQ ID NO: 788 - RNA, 23 nt, Artificial Sequence
  Synthetic sequence or sequence of unknown origin
caccaaagcugcccuuaccuggg

SEQ ID NO: 789 - RNA, 22 nt, Artificial Sequence
  Synthetic sequence or sequence of unknown origin
accaaagcugcccuuaccuggg

SEQ ID NO: 790 - RNA, 21 nt, Artificial Sequence
  Synthetic sequence or sequence of unknown origin
ccaaagcugcccuuaccuggg

SEQ ID NO: 791 - RNA, 20 nt, Artificial Sequence
  Synthetic sequence or sequence of unknown origin
caaagcugcccuuaccuggg

SEQ ID NO: 792 - RNA, 125 nt, Artificial Sequence; identical to SEQ ID NO: 177
  Synthetic sequence or sequence of unknown origin

SEQ ID NO: 793 - RNA, 125 nt, Artificial Sequence; identical to SEQ ID NO: 177
  Synthetic sequence or sequence of unknown origin

SEQ ID NO: 794 - RNA, 125 nt, Artificial Sequence; identical to SEQ ID NO: 177
  Synthetic sequence or sequence of unknown origin

SEQ ID NO: 795 - RNA, 125 nt, Artificial Sequence; identical to SEQ ID NO: 177
  Synthetic sequence or sequence of unknown origin

SEQ ID NO: 796 - RNA, 125 nt, Artificial Sequence; identical to SEQ ID NO: 177
  Synthetic sequence or sequence of unknown origin

SEQ ID NO: 797 - RNA, 125 nt, Artificial Sequence; identical to SEQ ID NO: 177
  Synthetic sequence or sequence of unknown origin

SEQ ID NO: 798 - RNA, 150 nt, Artificial Sequence
  Synthetic sequence or sequence of unknown origin
ggcaccaaagcugcccuuaccuggggucuuaguacucuguuggaaacaacaauaguucuaagauaaggcuauuuaugccguaggguauggugguaucccuuuaauccaccuuuaagccauugcuuaugcaauggcuuaucuauauuuuuu

SEQ ID NO: 799 - RNA, 149 nt, Artificial Sequence
  Synthetic sequence or sequence of unknown origin
gcaccaaagcugcccuuaccuggggucuuaguacucuguuggaaacaacaauaguucuaagauaaggcuauuuaugccguaggguauggugguaucccuuuaauccaccuuuaagccauugcuuaugcaauggcuuaucuauauuuuuu

SEQ ID NO: 800 - RNA, 148 nt, Artificial Sequence
  Synthetic sequence or sequence of unknown origin
caccaaagcugcccuuaccuggggucuuaguacucuguuggaaacaacaauaguucuaagauaaggcuauuuaugccguaggguauggugguaucccuuuaauccaccuuuaagccauugcuuaugcaauggcuuaucuauauuuuuu

SEQ ID NO: 801 - RNA, 147 nt, Artificial Sequence
  Synthetic sequence or sequence of unknown origin
accaaagcugcccuuaccuggggucuuaguacucuguuggaaacaacaauaguucuaagauaaggcuauuuaugccguaggguauggugguaucccuuuaauccaccuuuaagccauugcuuaugcaauggcuuaucuauauuuuuu

SEQ ID NO: 802 - RNA, 146 nt, Artificial Sequence
  Synthetic sequence or sequence of unknown origin
ccaaagcugcccuuaccuggggucuuaguacucuguuggaaacaacaauaguucuaagauaaggcuauuuaugccguaggguauggugguaucccuuuaauccaccuuuaagccauugcuuaugcaauggcuuaucuauauuuuuu

SEQ ID NO: 803 - RNA, 145 nt, Artificial Sequence
  Synthetic sequence or sequence of unknown origin
caaagcugcccuuaccuggggucuuaguacucuguuggaaacaacaauaguucuaagauaaggcuauuuaugccguaggguauggugguaucccuuuaauccaccuuuaagccauugcuuaugcaauggcuuaucuauauuuuuu

SEQ ID NO: 804 - DNA, 22 bp, Artificial Sequence
  Synthetic sequence or sequence of unknown origin
ggtgcggttcaccagggtgtcg

SEQ ID NO: 805 - DNA, 22 bp, Artificial Sequence
  Synthetic sequence or sequence of unknown origin
ggaagagcagagccttggtctc

What is claimed is:

1. A non-naturally occurring composition comprising a CRISPR nuclease comprising a sequence having at least 90% identity to the amino acid sequence selected from the group consisting of SEQ ID NOs: 1-11 and 13-39, or a nucleic acid molecule comprising a sequence encoding the CRISPR nuclease.

2. The composition of claim 1, further comprising one or more RNA molecules, or a DNA polynucleotide encoding any one of the one or more RNA molecules, wherein the one or more RNA molecules and the CRISPR nuclease do not naturally occur together and the one or more RNA molecules are configured to form a complex with the CRISPR nuclease and/or target the complex to a target site.

3. The composition of claim 2, wherein the CRISPR nuclease comprises a sequence having at least 90% identity to the amino acid sequence set forth in SEQ ID NO: 1, and at least one RNA molecule comprises a sequence selected from the group consisting of SEQ ID NOs: 118-135.

4. The composition of claim 3, wherein the CRISPR nuclease comprises a sequence having at least 90% identity to the amino acid sequence set forth in SEQ ID NO: 1 and at least one RNA molecule is a CRISPR RNA (crRNA) molecule comprising a guide sequence portion and a sequence selected from the group consisting of SEQ ID NOs: 118-121.

5. The composition of claim 4, further comprising a transactivating CRISPR RNA (tracrRNA) molecule comprising a sequence set forth in the group consisting of SEQ ID NOs: 122-130 and 133.

6. The composition of claim 2, wherein the CRISPR nuclease comprises a sequence having at least 90% identity to the amino acid sequence set forth in SEQ ID NO: 1 and at least one RNA molecule is a single-guide RNA (sgRNA) molecule comprising a guide sequence portion and a sequence selected from the group consisting of SEQ ID NOs: 118-135.

7. The composition of claim 2, wherein the CRISPR nuclease comprises a sequence having at least 90% identity to the amino acid sequence set forth in SEQ ID NO: 2, and at least one RNA molecule comprises a sequence selected from the group consisting of SEQ ID NOs: 136-146.

8. The composition of claim 7, wherein the CRISPR nuclease comprises a sequence having at least 90% identity to the amino acid sequence set forth in SEQ ID NO: 2 and at least one RNA molecule is a CRISPR RNA (crRNA) molecule comprising a guide sequence portion and a sequence selected from the group consisting of SEQ ID NOs: 136-139.

9. The composition of claim 8, further comprising a transactivating CRISPR RNA (tracrRNA) molecule comprising a sequence set forth in the group consisting of SEQ ID NOs: 140-145.

10. The composition of claim 2, wherein the CRISPR nuclease comprises a sequence having at least 90% identity to the amino acid sequence set forth in SEQ ID NO: 2 and at least one RNA molecule is a single-guide RNA (sgRNA) molecule comprising a guide sequence portion and a sequence selected from the group consisting of SEQ ID NOs: 136-146.

11. The composition of claim 2, wherein the CRISPR nuclease comprises a sequence having at least 90% identity to the amino acid sequence set forth in SEQ ID NO: 3, and at least one RNA molecule comprises a sequence selected from the group consisting of SEQ ID NOs: 147-162.

12. The composition of claim 11, wherein the CRISPR nuclease comprises a sequence having at least 90% identity to the amino acid sequence set forth in SEQ ID NO: 3 and at least one RNA molecule is a CRISPR RNA (crRNA) molecule comprising a guide sequence portion and a sequence selected from the group consisting of SEQ ID NOs: 147-150.

13. The composition of claim 12, further comprising a transactivating CRISPR RNA (tracrRNA) molecule comprising a sequence set forth in the group consisting of SEQ ID NOs: 151-158, 161, and 162.

14. The composition of claim 2, wherein the CRISPR nuclease comprises a sequence having at least 90% identity to the amino acid sequence set forth in SEQ ID NO: 3 and at least one RNA molecule is a single-guide RNA (sgRNA) molecule comprising a guide sequence portion and a sequence selected from the group consisting of SEQ ID NOs: 147-162.

15. The composition of claim 2, wherein the CRISPR nuclease comprises a sequence having at least 90% identity to the amino acid sequence set forth in SEQ ID NO: 4 and at least one RNA molecule comprises a sequence selected from the group consisting of SEQ ID NOs: 163-181.

16. The composition of claim 15, wherein the CRISPR nuclease comprises a sequence having at least 90% identity to the amino acid sequence set forth in SEQ ID NO: 4 and at least one RNA molecule is a CRISPR RNA (crRNA) molecule comprising a guide sequence portion and a sequence selected from the group consisting of SEQ ID NOs: 163-166 and 178-181.

17. The composition of claim 16, further comprising a transactivating CRISPR RNA (tracrRNA) molecule comprising a sequence set forth in the group consisting of SEQ ID NOs: 167-175.

18. The composition of claim 2, wherein the CRISPR nuclease comprises a sequence having at least 90% identity to the amino acid sequence set forth in SEQ ID NO: 4 and at least one RNA molecule is a single-guide RNA (sgRNA) molecule comprising a guide sequence portion and a sequence selected from the group consisting of SEQ ID NOs: 163-181.

19. The composition of claim 2, wherein the CRISPR nuclease comprises a sequence having at least 90% identity to the amino acid sequence set forth in SEQ ID NO: 5, and at least one RNA molecule comprises a sequence selected from the group consisting of SEQ ID NOs: 182-197.

20. The composition of claim 19, wherein the CRISPR nuclease comprises a sequence having at least 90% identity to the amino acid sequence set forth in SEQ ID NO: 5 and at least one RNA molecule is a CRISPR RNA (crRNA) molecule comprising a guide sequence portion and a sequence selected from the group consisting of SEQ ID NOs: 182-185.

21. The composition of claim 20, further comprising a transactivating CRISPR RNA (tracrRNA) molecule comprising a sequence set forth in the group consisting of SEQ ID NOs: 186-193, 196, and 197.

22. The composition of claim 2, wherein the CRISPR nuclease comprises a sequence having at least 90% identity to the amino acid sequence set forth in SEQ ID NO: 5 and at least one RNA molecule is a single-guide RNA (sgRNA) molecule comprising a guide sequence portion and a sequence selected from the group consisting of SEQ ID NOs: 182-197.

23. The composition of claim 2, wherein the CRISPR nuclease comprises a sequence having at least 90% identity to the amino acid sequence set forth in SEQ ID NO: 6, and at least one RNA molecule comprises a sequence selected from the group consisting of SEQ ID NOs: 198-212.

24. The composition of claim 23, wherein the CRISPR nuclease comprises a sequence having at least 90% identity to the amino acid sequence set forth in SEQ ID NO: 6 and at least one RNA molecule is a CRISPR RNA (crRNA) molecule comprising a guide sequence portion and a sequence selected from the group consisting of SEQ ID NOs: 198-201.

25. The composition of claim 24, further comprising a transactivating CRISPR RNA (tracrRNA) molecule comprising a sequence set forth in the group consisting of SEQ ID NOs: 202-209 and 212.

26. The composition of claim 2, wherein the CRISPR nuclease comprises a sequence having at least 90% identity to the amino acid sequence set forth in SEQ ID NO: 6 and at least one RNA molecule is a single-guide RNA (sgRNA) molecule comprising a guide sequence portion and a sequence selected from the group consisting of SEQ ID NOs: 198-212.

27. The composition of claim 2, wherein the CRISPR nuclease comprises a sequence having at least 90% identity to the amino acid sequence set forth in SEQ ID NO: 7, and at least one RNA molecule comprises a sequence selected from the group consisting of SEQ ID NOs: 213-234.

28. The composition of claim 27, wherein the CRISPR nuclease comprises a sequence having at least 90% identity to the amino acid sequence set forth in SEQ ID NO: 7 and at least one RNA molecule is a CRISPR RNA (crRNA) molecule comprising a guide sequence portion and a sequence selected from the group consisting of SEQ ID NOs: 213-216 and 227-230.

29. The composition of claim 29, further comprising a transactivating CRISPR RNA (tracrRNA) molecule comprising a sequence set forth in the group consisting of SEQ ID NOs: 217-224 and 231-234.

30. The composition of claim 2, wherein the CRISPR nuclease comprises a sequence having at least 90% identity to the amino acid sequence set forth in SEQ ID NO: 7 and at least one RNA molecule is a single-guide RNA (sgRNA) molecule comprising a guide sequence portion and a sequence selected from the group consisting of SEQ ID NOs: 213-234.

31. The composition of claim 2, wherein the CRISPR nuclease comprises a sequence having at least 90% identity to the amino acid sequence set forth in SEQ ID NO: 8, and at least one RNA molecule comprises a sequence selected from the group consisting of SEQ ID NOs: 235-252.

32. The composition of claim 31, wherein the CRISPR nuclease comprises a sequence having at least 90% identity to the amino acid sequence set forth in SEQ ID NO: 8 and at least one RNA molecule is a CRISPR RNA (crRNA) molecule comprising a guide sequence portion and a sequence selected from the group consisting of SEQ ID NOs: 235-238.

33. The composition of claim 32, further comprising a transactivating CRISPR RNA (tracrRNA) molecule comprising a sequence set forth in the group consisting of SEQ ID NOs: 239-247 and 250-252.

34. The composition of claim 2, wherein the CRISPR nuclease comprises a sequence having at least 90% identity to the amino acid sequence set forth in SEQ ID NO: 8 and at least one RNA molecule is a single-guide RNA (sgRNA) molecule comprising a guide sequence portion and a sequence selected from the group consisting of SEQ ID NOs: 235-252.

35. The composition of claim 2, wherein the CRISPR nuclease comprises a sequence having at least 90% identity to the amino acid sequence set forth in SEQ ID NO: 9, and at least one RNA molecule comprises a sequence selected from the group consisting of SEQ ID NOs: 253-265.

36. The composition of claim 35, wherein the CRISPR nuclease comprises a sequence having at least 90% identity to the amino acid sequence set forth in SEQ ID NO: 9 and at least one RNA molecule is a CRISPR RNA (crRNA) molecule comprising a guide sequence portion and a sequence selected from the group consisting of SEQ ID NOs: 253-256.

37. The composition of claim 36, further comprising a transactivating CRISPR RNA (tracrRNA) molecule comprising a sequence set forth in the group consisting of SEQ ID NOs: 257-264.

38. The composition of claim 2, wherein the CRISPR nuclease comprises a sequence having at least 90% identity to the amino acid sequence set forth in SEQ ID NO: 9 and at least one RNA molecule is a single-guide RNA (sgRNA) molecule comprising a guide sequence portion and a sequence selected from the group consisting of SEQ ID NOs: 253-265.

39. The composition of claim 2, wherein the CRISPR nuclease comprises a sequence having at least 90% identity to the amino acid sequence set forth in SEQ ID NO: 10, and at least one RNA molecule comprises a sequence selected from the group consisting of SEQ ID NOs: 266-279.

40. The composition of claim 39, wherein the CRISPR nuclease comprises a sequence having at least 90% identity to the amino acid sequence set forth in SEQ ID NO: 10 and at least one RNA molecule is a CRISPR RNA (crRNA) molecule comprising a guide sequence portion and a sequence selected from the group consisting of SEQ ID NOs: 266-269.

41. The composition of claim 40, further comprising a transactivating CRISPR RNA (tracrRNA) molecule comprising a sequence set forth in the group consisting of SEQ ID NOs: 270-278.

42. The composition of claim 2, wherein the CRISPR nuclease comprises a sequence having at least 90% identity to the amino acid sequence set forth in SEQ ID NO: 10 and at least one RNA molecule is a single-guide RNA (sgRNA) molecule comprising a guide sequence portion and a sequence selected from the group consisting of SEQ ID NOs: 266-279.

43. The composition of claim 2, wherein the CRISPR nuclease comprises a sequence having at least 90% identity to the amino acid sequence set forth in SEQ ID NO: 11 and at least one RNA molecule comprises a sequence selected from the group consisting of SEQ ID NOs: 280-287, 302-322, UCUUUGUGU, and UUUGUGU.

44. The composition of claim 43, wherein the CRISPR nuclease comprises a sequence having at least 90% identity to the amino acid sequence set forth in SEQ ID NO: 11 and at least one RNA molecule is a CRISPR RNA (crRNA) molecule comprising a guide sequence portion and a sequence selected from the group consisting of SEQ ID NOs: 280-282, 302-305, and 313-316.

45. The composition of claim 44, further comprising a transactivating CRISPR RNA (tracrRNA) molecule comprising a sequence set forth in the group consisting of SEQ ID NOs: 283-286, 306-311, 317-321, UCUUUGUGU, and UUUGUGU.

46. The composition of claim 2, wherein the CRISPR nuclease comprises a sequence having at least 90% identity to the amino acid sequence set forth in SEQ ID NO: 11 and at least one RNA molecule is a single-guide RNA (sgRNA) molecule comprising a guide sequence portion and a sequence selected from the group consisting of SEQ ID NOs: 280-287, 302-322, UCUUUGUGU, and UUUGUGU.

47. The composition of claim 2, wherein the CRISPR nuclease comprises a sequence having at least 90% identity to the amino acid sequence set forth in SEQ ID NO: 13 and at least one RNA molecule comprises a sequence selected from the group consisting of SEQ ID NOs: 280-287, 302-322, UCUUUGUGU, and UUUGUGU.

48. The composition of claim 47, wherein the CRISPR nuclease comprises a sequence having at least 90% identity to the amino acid sequence set forth in SEQ ID NO: 13 and at least one RNA molecule is a CRISPR RNA (crRNA) molecule comprising a guide sequence portion and a sequence selected from the group consisting of SEQ ID NOs: 280-282, 302-305, and 313-316.

49. The composition of claim 48, further comprising a transactivating CRISPR RNA (tracrRNA) molecule comprising a sequence set forth in the group consisting of SEQ ID NOs: 283-286, 306-311, 317-321, UCUUUGUGU, and UUUGUGU.

50. The composition of claim 2, wherein the CRISPR nuclease comprises a sequence having at least 90% identity to the amino acid sequence set forth in SEQ ID NO: 13 and at least one RNA molecule is a single-guide RNA (sgRNA) molecule comprising a guide sequence portion and a sequence selected from the group consisting of SEQ ID NOs: 280-287, 302-322, UCUUUGUGU, and UUUGUGU.

51. The composition of claim 2, wherein the CRISPR nuclease comprises a sequence having at least 90% identity to the amino acid sequence set forth in SEQ ID NO: 14 and at least one RNA molecule comprises a sequence selected from the group consisting of SEQ ID NOs: 280-287, 302-322, UCUUUGUGU, and UUUGUGU.

52. The composition of claim 51, wherein the CRISPR nuclease comprises a sequence having at least 90% identity to the amino acid sequence set forth in SEQ ID NO: 14 and at least one RNA molecule is a CRISPR RNA (crRNA) molecule comprising a guide sequence portion and a sequence selected from the group consisting of SEQ ID NOs: 280-282, 302-305, and 313-316.

53. The composition of claim 52, further comprising a transactivating CRISPR RNA (tracrRNA) molecule comprising a sequence set forth in the group consisting of SEQ ID NOs: 283-286, 306-311, 317-321, UCUUUGUGU, and UUUGUGU.

54. The composition of claim 2, wherein the CRISPR nuclease comprises a sequence having at least 90% identity to the amino acid sequence set forth in SEQ ID NO: 14 and at least one RNA molecule is a single-guide RNA (sgRNA) molecule comprising a guide sequence portion and a sequence selected from the group consisting of SEQ ID NOs: 280-287, 302-322, UCUUUGUGU, and UUUGUGU.

55. The composition of claim 2, wherein the CRISPR nuclease comprises a sequence having at least 90% identity to the amino acid sequence set forth in SEQ ID NO: 15, and at least one RNA molecule comprises a sequence selected from the group consisting of SEQ ID NOs: 323-335 and GGCUUUGCC.

56. The composition of claim 55, wherein the CRISPR nuclease comprises a sequence having at least 90% identity to the amino acid sequence set forth in SEQ ID NO: 15 and at least one RNA molecule is a CRISPR RNA (crRNA) molecule comprising a guide sequence portion and a sequence selected from the group consisting of SEQ ID NOs: 323-326.

57. The composition of claim 56, further comprising a transactivating CRISPR RNA (tracrRNA) molecule comprising a sequence set forth in the group consisting of SEQ ID NOs: 327-334 and GGCUUUGCC.

58. The composition of claim 2, wherein the CRISPR nuclease comprises a sequence having at least 90% identity to the amino acid sequence set forth in SEQ ID NO: 15 and at least one RNA molecule is a single-guide RNA (sgRNA) molecule comprising a guide sequence portion and a sequence selected from the group consisting of SEQ ID NOs: 323-335 and GGCUUUGCC.

59. The composition of claim 2, wherein the CRISPR nuclease comprises a sequence having at least 90% identity to the amino acid sequence set forth in SEQ ID NO: 16, and at least one RNA molecule comprises a sequence selected from the group consisting of SEQ ID NOs: 336-354.

60. The composition of claim 59, wherein the CRISPR nuclease comprises a sequence having at least 90% identity to the amino acid sequence set forth in SEQ ID NO: 16 and at least one RNA molecule is a CRISPR RNA (crRNA) molecule comprising a guide sequence portion and a sequence selected from the group consisting of SEQ ID NOs: 336-339.

61. The composition of claim 60, further comprising a transactivating CRISPR RNA (tracrRNA) molecule comprising a sequence set forth in the group consisting of SEQ ID NOs: 340-349 and 352-354.

62. The composition of claim 2, wherein the CRISPR nuclease comprises a sequence having at least 90% identity to the amino acid sequence set forth in SEQ ID NO: 16 and at least one RNA molecule is a single-guide RNA (sgRNA) molecule comprising a guide sequence portion and a sequence selected from the group consisting of SEQ ID NOs: 336-354.

63. The composition of claim 2, wherein the CRISPR nuclease comprises a sequence having at least 90% identity to the amino acid sequence set forth in SEQ ID NO: 17, and at least one RNA molecule comprises a sequence selected from the group consisting of SEQ ID NOs: 355-366.

64. The composition of claim 63, wherein the CRISPR nuclease comprises a sequence having at least 90% identity to the amino acid sequence set forth in SEQ ID NO: 17 and at least one RNA molecule is a CRISPR RNA (crRNA) molecule comprising a guide sequence portion and a sequence selected from the group consisting of SEQ ID NOs: 355-358.

65. The composition of claim 64, further comprising a transactivating CRISPR RNA (tracrRNA) molecule comprising a sequence set forth in the group consisting of SEQ ID NOs: 359-365.

66. The composition of claim 2, wherein the CRISPR nuclease comprises a sequence having at least 90% identity to the amino acid sequence set forth in SEQ ID NO: 17 and at least one RNA molecule is a single-guide RNA (sgRNA) molecule comprising a guide sequence portion and a sequence selected from the group consisting of SEQ ID NOs: 355-366.

67. The composition of claim 2, wherein the CRISPR nuclease comprises a sequence having at least 90% identity to the amino acid sequence set forth in SEQ ID NO: 18, and at least one RNA molecule comprises a sequence selected from the group consisting of SEQ ID NOs: 367-380.

68. The composition of claim 67, wherein the CRISPR nuclease comprises a sequence having at least 90% identity to the amino acid sequence set forth in SEQ ID NO: 18 and at least one RNA molecule is a CRISPR RNA (crRNA) molecule comprising a guide sequence portion and a sequence selected from the group consisting of SEQ ID NOs: 367-370.

69. The composition of claim 68, further comprising a transactivating CRISPR RNA (tracrRNA) molecule comprising a sequence set forth in the group consisting of SEQ ID NOs: 371-379.

70. The composition of claim 2, wherein the CRISPR nuclease comprises a sequence having at least 90% identity to the amino acid sequence set forth in SEQ ID NO: 18 and at least one RNA molecule is a single-guide RNA (sgRNA) molecule comprising a guide sequence portion and a sequence selected from the group consisting of SEQ ID NOs: 367-380.

71. The composition of claim 2, wherein the CRISPR nuclease comprises a sequence having at least 90% identity to the amino acid sequence set forth in SEQ ID NO: 19 and at least one RNA molecule comprises a sequence selected from the group consisting of SEQ ID NOs: 381-395, 600-614, 679-695, CGUUCAAAU, and UUAAAGUAA.

72. The composition of claim 71, wherein the CRISPR nuclease comprises a sequence having at least 90% identity to the amino acid sequence set forth in SEQ ID NO: 19 and at least one RNA molecule is a CRISPR RNA (crRNA) molecule comprising a guide sequence portion and a sequence selected from the group consisting of SEQ ID NOs: 381-384, 600-603, 679-682, and 691-694.

73. The composition of claim 72, further comprising a transactivating CRISPR RNA (tracrRNA) molecule comprising a sequence set forth in the group consisting of SEQ ID NOs: 385-392, 395, 604-611, 614, 683-688, 695, UUAAAGUAA, and CGUUCAAAU.

74. The composition of claim 2, wherein the CRISPR nuclease comprises a sequence having at least 90% identity to the amino acid sequence set forth in SEQ ID NO: 19 and at least one RNA molecule is a single-guide RNA (sgRNA) molecule comprising a guide sequence portion and a sequence selected from the group consisting of SEQ ID NOs: 381-395, 600-614, 679-695, CGUUCAAAU, and UUAAAGUAA.

75. The composition of claim 2, wherein the CRISPR nuclease comprises a sequence having at least 90% identity to the amino acid sequence set forth in SEQ ID NO: 20 and at least one RNA molecule comprises a sequence selected from the group consisting of SEQ ID NOs: 396-418, CAAUAAAAC, and CAAUAUAAC.

76. The composition of claim 75, wherein the CRISPR nuclease comprises a sequence having at least 90% identity to the amino acid sequence set forth in SEQ ID NO: 20 and at least one RNA molecule is a CRISPR RNA (crRNA) molecule comprising a guide sequence portion and a sequence selected from the group consisting of SEQ ID NOs: 396-399 and 409-412.

77. The composition of claim 76, further comprising a transactivating CRISPR RNA (tracrRNA) molecule comprising a sequence set forth in the group consisting of SEQ ID NOs: 400-406, 413-418, CAAUAAAAC, and CAAUAUAAC.

78. The composition of claim 2, wherein the CRISPR nuclease comprises a sequence having at least 90% identity to the amino acid sequence set forth in SEQ ID NO: 20 and at least one RNA molecule is a single-guide RNA (sgRNA) molecule comprising a guide sequence portion and a sequence selected from the group consisting of SEQ ID NOs: 396-418, CAAUAAAAC, and CAAUAUAAC.

79. The composition of claim 2, wherein the CRISPR nuclease comprises a sequence having at least 90% identity to the amino acid sequence set forth in SEQ ID NO: 21 and at least one RNA molecule comprises a sequence selected from the group consisting of SEQ ID NOs: 396-418, CAAUAAAAC, and CAAUAUAAC.

80. The composition of claim 79, wherein the CRISPR nuclease comprises a sequence having at least 90% identity to the amino acid sequence set forth in SEQ ID NO: 21 and at least one RNA molecule is a CRISPR RNA (crRNA) molecule comprising a guide sequence portion and a sequence selected from the group consisting of SEQ ID NOs: 396-399 and 409-412.

81. The composition of claim 80, further comprising a transactivating CRISPR RNA (tracrRNA) molecule comprising a sequence set forth in the group consisting of SEQ ID NOs: 400-406, 413-418, CAAUAAAAC, and CAAUAUAAC.

82. The composition of claim 2, wherein the CRISPR nuclease comprises a sequence having at least 90% identity to the amino acid sequence set forth in SEQ ID NO: 21 and at least one RNA molecule is a single-guide RNA (sgRNA) molecule comprising a guide sequence portion and a sequence selected from the group consisting of SEQ ID NOs: 396-418, CAAUAAAAC, and CAAUAUAAC.

83. The composition of claim 2, wherein the CRISPR nuclease comprises a sequence having at least 90% identity to the amino acid sequence set forth in SEQ ID NO: 22, and at least one RNA molecule comprises a sequence selected from the group consisting of SEQ ID NOs: 419-434.

84. The composition of claim 83, wherein the CRISPR nuclease comprises a sequence having at least 90% identity to the amino acid sequence set forth in SEQ ID NO: 22 and at least one RNA molecule is a CRISPR RNA (crRNA) molecule comprising a guide sequence portion and a sequence selected from the group consisting of SEQ ID NOs: 419-422.

85. The composition of claim 84, further comprising a transactivating CRISPR RNA (tracrRNA) molecule comprising a sequence set forth in the group consisting of SEQ ID NOs: 423-430, 433, and 434.

86. The composition of claim 2, wherein the CRISPR nuclease comprises a sequence having at least 90% identity to the amino acid sequence set forth in SEQ ID NO: 22 and at least one RNA molecule is a single-guide RNA (sgRNA) molecule comprising a guide sequence portion and a sequence selected from the group consisting of SEQ ID NOs: 419-434.

87. The composition of claim 2, wherein the CRISPR nuclease comprises a sequence having at least 90% identity to the amino acid sequence set forth in SEQ ID NO: 23, and at least one RNA molecule comprises a sequence selected from the group consisting of SEQ ID NOs: 435-447.

88. The composition of claim 87, wherein the CRISPR nuclease comprises a sequence having at least 90% identity to the amino acid sequence set forth in SEQ ID NO: 23 and at least one RNA molecule is a CRISPR RNA (crRNA) molecule comprising a guide sequence portion and a sequence selected from the group consisting of SEQ ID NOs: 435-438.

89. The composition of claim 88, further comprising a transactivating CRISPR RNA (tracrRNA) molecule comprising a sequence set forth in the group consisting of SEQ ID NOs: 439-446.

90. The composition of claim 2, wherein the CRISPR nuclease comprises a sequence having at least 90% identity to the amino acid sequence set forth in SEQ ID NO: 23 and at least one RNA molecule is a single-guide RNA (sgRNA) molecule comprising a guide sequence portion and a sequence selected from the group consisting of SEQ ID NOs: 435-447.

91. The composition of claim 2, wherein the CRISPR nuclease comprises a sequence having at least 90% identity to the amino acid sequence set forth in SEQ ID NO: 24, and at least one RNA molecule comprises a sequence selected from the group consisting of SEQ ID NOs: 448-464, and GGUUUAACC.

92. The composition of claim 91, wherein the CRISPR nuclease comprises a sequence having at least 90% identity to the amino acid sequence set forth in SEQ ID NO: 24 and at least one RNA molecule is a CRISPR RNA (crRNA) molecule comprising a guide sequence portion and a sequence selected from the group consisting of SEQ ID NOs: 448-451.

93. The composition of claim 92, further comprising a transactivating CRISPR RNA (tracrRNA) molecule comprising a sequence set forth in the group consisting of SEQ ID NOs: 452-460, 463, and GGUUUAACC.

94. The composition of claim 2, wherein the CRISPR nuclease comprises a sequence having at least 90% identity to the amino acid sequence set forth in SEQ ID NO: 24 and at least one RNA molecule is a single-guide RNA (sgRNA) molecule comprising a guide sequence portion and a sequence selected from the group consisting of SEQ ID NOs: 448-464, and GGUUUAACC.

95. The composition of claim 2, wherein the CRISPR nuclease comprises a sequence having at least 90% identity to the amino acid sequence set forth in SEQ ID NO: 25, and at least one RNA molecule comprises a sequence selected from the group consisting of SEQ ID NOs: 465-476.

96. The composition of claim 95, wherein the CRISPR nuclease comprises a sequence having at least 90% identity to the amino acid sequence set forth in SEQ ID NO: 25 and at least one RNA molecule is a CRISPR RNA (crRNA) molecule comprising a guide sequence portion and a sequence selected from the group consisting of SEQ ID NOs: 465-468.

97. The composition of claim 96, further comprising a transactivating CRISPR RNA (tracrRNA) molecule comprising a sequence set forth in the group consisting of SEQ ID NOs: 469-475.

98. The composition of claim 2, wherein the CRISPR nuclease comprises a sequence having at least 90% identity to the amino acid sequence set forth in SEQ ID NO: 25 and at least one RNA molecule is a single-guide RNA (sgRNA) molecule comprising a guide sequence portion and a sequence selected from the group consisting of SEQ ID NOs: 465-476.

99. The composition of claim 2, wherein the CRISPR nuclease comprises a sequence having at least 90% identity to the amino acid sequence set forth in SEQ ID NO: 26, and at least one RNA molecule comprises a sequence selected from the group consisting of SEQ ID NOs: 477-490.

100. The composition of claim 99, wherein the CRISPR nuclease comprises a sequence having at least 90% identity to the amino acid sequence set forth in SEQ ID NO: 26 and at least one RNA molecule is a CRISPR RNA (crRNA) molecule comprising a guide sequence portion and a sequence selected from the group consisting of SEQ ID NOs: 477-480.

101. The composition of claim 100, further comprising a transactivating CRISPR RNA (tracrRNA) molecule comprising a sequence set forth in the group consisting of SEQ ID NOs: 481-489.

102. The composition of claim 2, wherein the CRISPR nuclease comprises a sequence having at least 90% identity to the amino acid sequence set forth in SEQ ID NO: 26 and at least one RNA molecule is a single-guide RNA (sgRNA) molecule comprising a guide sequence portion and a sequence selected from the group consisting of SEQ ID NOs: 477-490.

103. The composition of claim 2, wherein the CRISPR nuclease comprises a sequence having at least 90% identity to the amino acid sequence set forth in SEQ ID NO: 27, and at least one RNA molecule comprises a sequence selected from the group consisting of SEQ ID NOs: 491-503.

104. The composition of claim 103, wherein the CRISPR nuclease comprises a sequence having at least 90% identity to the amino acid sequence set forth in SEQ ID NO: 27 and at least one RNA molecule is a CRISPR RNA (crRNA) molecule comprising a guide sequence portion and a sequence selected from the group consisting of SEQ ID NOs: 491-494.

105. The composition of claim 104, further comprising a transactivating CRISPR RNA (tracrRNA) molecule comprising a sequence set forth in the group consisting of SEQ ID NOs: 495-502.

106. The composition of claim 2, wherein the CRISPR nuclease comprises a sequence having at least 90% identity to the amino acid sequence set forth in SEQ ID NO: 27 and at least one RNA molecule is a single-guide RNA (sgRNA) molecule comprising a guide sequence portion and a sequence selected from the group consisting of SEQ ID NOs: 491-503.

107. The composition of claim 2, wherein the CRISPR nuclease comprises a sequence having at least 90% identity to the amino acid sequence set forth in SEQ ID NO: 28, and at least one RNA molecule comprises a sequence selected from the group consisting of SEQ ID NOs: 504-516.

108. The composition of claim 107, wherein the CRISPR nuclease comprises a sequence having at least 90% identity to the amino acid sequence set forth in SEQ ID NO: 28 and at least one RNA molecule is a CRISPR RNA (crRNA) molecule comprising a guide sequence portion and a sequence selected from the group consisting of SEQ ID NOs: 504-507.

109. The composition of claim 108, further comprising a transactivating CRISPR RNA (tracrRNA) molecule comprising a sequence set forth in the group consisting of SEQ ID NOs: 508-515.

110. The composition of claim 2, wherein the CRISPR nuclease comprises a sequence having at least 90% identity to the amino acid sequence set forth in SEQ ID NO: 28 and at least one RNA molecule is a single-guide RNA (sgRNA) molecule comprising a guide sequence portion and a sequence selected from the group consisting of SEQ ID NOs: 504-516.

111. The composition of claim 2, wherein the CRISPR nuclease comprises a sequence having at least 90% identity to the amino acid sequence set forth in SEQ ID NO: 29, and at least one RNA molecule comprises a sequence selected from the group consisting of SEQ ID NOs: 517-530.

112. The composition of claim 111, wherein the CRISPR nuclease comprises a sequence having at least 90% identity to the amino acid sequence set forth in SEQ ID NO: 29 and at least one RNA molecule is a CRISPR RNA (crRNA) molecule comprising a guide sequence portion and a sequence selected from the group consisting of SEQ ID NOs: 517-520.

113. The composition of claim 112, further comprising a transactivating CRISPR RNA (tracrRNA) molecule comprising a sequence set forth in the group consisting of SEQ ID NOs: 521-529.

114. The composition of claim 2, wherein the CRISPR nuclease comprises a sequence having at least 90% identity to the amino acid sequence set forth in SEQ ID NO: 29 and at least one RNA molecule is a single-guide RNA (sgRNA) molecule comprising a guide sequence portion and a sequence selected from the group consisting of SEQ ID NOs: 517-530.

115. The composition of claim 2, wherein the CRISPR nuclease comprises a sequence having at least 90% identity to the amino acid sequence set forth in SEQ ID NO: 30, and at least one RNA molecule comprises a sequence selected from the group consisting of SEQ ID NOs: 531-544.

116. The composition of claim 115, wherein the CRISPR nuclease comprises a sequence having at least 90% identity to the amino acid sequence set forth in SEQ ID NO: 30 and at least one RNA molecule is a CRISPR RNA (crRNA) molecule comprising a guide sequence portion and a sequence selected from the group consisting of SEQ ID NOs: 531-534.

117. The composition of claim 116, further comprising a transactivating CRISPR RNA (tracrRNA) molecule comprising a sequence set forth in the group consisting of SEQ ID NOs: 535-543.

118. The composition of claim 2, wherein the CRISPR nuclease comprises a sequence having at least 90% identity to the amino acid sequence set forth in SEQ ID NO: 30 and at least one RNA molecule is a single-guide RNA (sgRNA) molecule comprising a guide sequence portion and a sequence selected from the group consisting of SEQ ID NOs: 531-544.

119. The composition of claim 2, wherein the CRISPR nuclease comprises a sequence having at least 90% identity to the amino acid sequence set forth in SEQ ID NO: 31, and at least one RNA molecule comprises a sequence selected from the group consisting of SEQ ID NOs: 545-560.

120. The composition of claim 119, wherein the CRISPR nuclease comprises a sequence having at least 90% identity to the amino acid sequence set forth in SEQ ID NO: 31 and at least one RNA molecule is a CRISPR RNA (crRNA) molecule comprising a guide sequence portion and a sequence selected from the group consisting of SEQ ID NOs: 545-548.

121. The composition of claim 120, further comprising a transactivating CRISPR RNA (tracrRNA) molecule comprising a sequence set forth in the group consisting of SEQ ID NOs: 549-556, 559, and 560.

122. The composition of claim 2, wherein the CRISPR nuclease comprises a sequence having at least 90% identity to the amino acid sequence set forth in SEQ ID NO: 31 and at least one RNA molecule is a single-guide RNA (sgRNA) molecule comprising a guide sequence portion and a sequence selected from the group consisting of SEQ ID NOs: 545-560.

123. The composition of claim 2, wherein the CRISPR nuclease comprises a sequence having at least 90% identity to the amino acid sequence set forth in SEQ ID NO: 32, and at least one RNA molecule comprises a sequence selected from the group consisting of SEQ ID NOs: 561-575.

124. The composition of claim 123, wherein the CRISPR nuclease comprises a sequence having at least 90% identity to the amino acid sequence set forth in SEQ ID NO: 32 and at least one RNA molecule is a CRISPR RNA (crRNA) molecule comprising a guide sequence portion and a sequence selected from the group consisting of SEQ ID NOs: 561-564.

125. The composition of claim 124, further comprising a transactivating CRISPR RNA (tracrRNA) molecule comprising a sequence set forth in the group consisting of SEQ ID NOs: 565-574.

126. The composition of claim 2, wherein the CRISPR nuclease comprises a sequence having at least 90% identity to the amino acid sequence set forth in SEQ ID NO: 32 and at least one RNA molecule is a single-guide RNA (sgRNA) molecule comprising a guide sequence portion and a sequence selected from the group consisting of SEQ ID NOs: 561-575.

127. The composition of claim 2, wherein the CRISPR nuclease comprises a sequence having at least 90% identity to the amino acid sequence set forth in SEQ ID NO: 33 and at least one RNA molecule comprises a sequence selected from the group consisting of SEQ ID NOs: 288-301 and 576-590.

128. The composition of claim 127, wherein the CRISPR nuclease comprises a sequence having at least 90% identity to the amino acid sequence set forth in SEQ ID NO: 33 and at least one RNA molecule is a CRISPR RNA (crRNA) molecule comprising a guide sequence portion and a sequence selected from the group consisting of SEQ ID NOs: 288-291 and 576-579.

129. The composition of claim 128, further comprising a transactivating CRISPR RNA (tracrRNA) molecule comprising a sequence set forth in the group consisting of SEQ ID NOs: 292-298, 301, 580-586, and 590.

130. The composition of claim 2, wherein the CRISPR nuclease comprises a sequence having at least 90% identity to the amino acid sequence set forth in SEQ ID NO: 33 and at least one RNA molecule is a single-guide RNA (sgRNA) molecule comprising a guide sequence portion and a sequence selected from the group consisting of SEQ ID NOs: 288-301 and 576-590.

131. The composition of claim 2, wherein the CRISPR nuclease comprises a sequence having at least 90% identity to the amino acid sequence set forth in SEQ ID NO: 34, and at least one RNA molecule comprises a sequence selected from the group consisting of SEQ ID NOs: 591-599, UUACAAGGU, and ACAAGGU.

132. The composition of claim 131, wherein the CRISPR nuclease comprises a sequence having at least 90% identity to the amino acid sequence set forth in SEQ ID NO: 34 and at least one RNA molecule is a CRISPR RNA (crRNA) molecule comprising a guide sequence portion and a sequence selected from the group consisting of SEQ ID NOs: 591 and 592.

133. The composition of claim 132, further comprising a transactivating CRISPR RNA (tracrRNA) molecule comprising a sequence set forth in the group consisting of SEQ ID NOs: 593-596, 599, UUACAAGGU, and ACAAGGU.

134. The composition of claim 2, wherein the CRISPR nuclease comprises a sequence having at least 90% identity to the amino acid sequence set forth in SEQ ID NO: 34 and at least one RNA molecule is a single-guide RNA (sgRNA) molecule comprising a guide sequence portion and a sequence selected from the group consisting of SEQ ID NOs: 591-599, UUACAAGGU, and ACAAGGU.

135. The composition of claim 2, wherein the CRISPR nuclease comprises a sequence having at least 90% identity to the amino acid sequence set forth in SEQ ID NO: 35 and at least one RNA molecule comprises a sequence selected from the group consisting of SEQ ID NOs: 381-395, 600-614, 679-695, CGUUCAAAU, and UUAAAGUAA.

136. The composition of claim 135, wherein the CRISPR nuclease comprises a sequence having at least 90% identity to the amino acid sequence set forth in SEQ ID NO: 35 and at least one RNA molecule is a CRISPR RNA (crRNA) molecule comprising a guide sequence portion and a sequence selected from the group consisting of SEQ ID NOs: 381-384, 600-603, 679-682, and 691-694.

137. The composition of claim 136, further comprising a transactivating CRISPR RNA (tracrRNA) molecule comprising a sequence set forth in the group consisting of SEQ ID NOs: 385-392, 395, 604-611, 614, 683-688, 695, UUAAAGUAA, and CGUUCAAAU.

138. The composition of claim 2, wherein the CRISPR nuclease comprises a sequence having at least 90% identity to the amino acid sequence set forth in SEQ ID NO: 35 and at least one RNA molecule is a single-guide RNA (sgRNA) molecule comprising a guide sequence portion and a sequence selected from the group consisting of SEQ ID NOs: 381-395, 600-614, 679-695, CGUUCAAAU, and UUAAAGUAA.

139. The composition of claim 2, wherein the CRISPR nuclease comprises a sequence having at least 90% identity to the amino acid sequence set forth in SEQ ID NO: 36, and at least one RNA molecule comprises a sequence selected from the group consisting of SEQ ID NOs: 615-631.

140. The composition of claim 139, wherein the CRISPR nuclease comprises a sequence having at least 90% identity to the amino acid sequence set forth in SEQ ID NO: 36 and at least one RNA molecule is a CRISPR RNA (crRNA) molecule comprising a guide sequence portion and a sequence selected from the group consisting of SEQ ID NOs: 615-618.

141. The composition of claim 140, further comprising a transactivating CRISPR RNA (tracrRNA) molecule comprising a sequence set forth in the group consisting of SEQ ID NOs: 619-628 and 631.

142. The composition of claim 2, wherein the CRISPR nuclease comprises a sequence having at least 90% identity to the amino acid sequence set forth in SEQ ID NO: 36 and at least one RNA molecule is a single-guide RNA (sgRNA) molecule comprising a guide sequence portion and a sequence selected from the group consisting of SEQ ID NOs: 615-631.

143. The composition of claim 2, wherein the CRISPR nuclease comprises a sequence having at least 90% identity to the amino acid sequence set forth in SEQ ID NO: 37, and at least one RNA molecule comprises a sequence selected from the group consisting of SEQ ID NOs: 632-646.

144. The composition of claim 143, wherein the CRISPR nuclease comprises a sequence having at least 90% identity to the amino acid sequence set forth in SEQ ID NO: 37 and at least one RNA molecule is a CRISPR RNA (crRNA) molecule comprising a guide sequence portion and a sequence selected from the group consisting of SEQ ID NOs: 632-635.

145. The composition of claim 144, further comprising a transactivating CRISPR RNA (tracrRNA) molecule comprising a sequence set forth in the group consisting of SEQ ID NOs: 636-643 and 646.

146. The composition of claim 2, wherein the CRISPR nuclease comprises a sequence having at least 90% identity to the amino acid sequence set forth in SEQ ID NO: 37 and at least one RNA molecule is a single-guide RNA (sgRNA) molecule comprising a guide sequence portion and a sequence selected from the group consisting of SEQ ID NOs: 632-646.

147. The composition of claim 2, wherein the CRISPR nuclease comprises a sequence having at least 90% identity to the amino acid sequence set forth in SEQ ID NO: 38, and at least one RNA molecule comprises a sequence selected from the group consisting of SEQ ID NOs: 647-665.

148. The composition of claim 147, wherein the CRISPR nuclease comprises a sequence having at least 90% identity to the amino acid sequence set forth in SEQ ID NO: 38 and at least one RNA molecule is a CRISPR RNA (crRNA) molecule comprising a guide sequence portion and a sequence selected from the group consisting of SEQ ID NOs: 647-650 and 662-665.

149. The composition of claim 148, further comprising a transactivating CRISPR RNA (tracrRNA) molecule comprising a sequence set forth in the group consisting of SEQ ID NOs: 651-659.

150. The composition of claim 2, wherein the CRISPR nuclease comprises a sequence having at least 90% identity to the amino acid sequence set forth in SEQ ID NO: 38 and at least one RNA molecule is a single-guide RNA (sgRNA) molecule comprising a guide sequence portion and a sequence selected from the group consisting of SEQ ID NOs: 647-665.

151. The composition of claim 2, wherein the CRISPR nuclease comprises a sequence having at least 90% identity to the amino acid sequence set forth in SEQ ID NO: 39, and at least one RNA molecule comprises a sequence selected from the group consisting of SEQ ID NOs: 666-678.

152. The composition of claim 151, wherein the CRISPR nuclease comprises a sequence having at least 90% identity to the amino acid sequence set forth in SEQ ID NO: 39 and at least one RNA molecule is a CRISPR RNA (crRNA) molecule comprising a guide sequence portion and a sequence selected from the group consisting of SEQ ID NOs: 666-669.

153. The composition of claim 152, further comprising a transactivating CRISPR RNA (tracrRNA) molecule comprising a sequence set forth in the group consisting of SEQ ID NOs: 670-677.

154. The composition of claim 2, wherein the CRISPR nuclease comprises a sequence having at least 90% identity to the amino acid sequence set forth in SEQ ID NO: 39 and at least one RNA molecule is a single-guide RNA (sgRNA) molecule comprising a guide sequence portion and a sequence selected from the group consisting of SEQ ID NOs: 666-678.

155. The composition of any one of claims 1-154, wherein the CRISPR nuclease is a nickase having an inactivated RuvC domain created by an amino acid substitution at a position provided for the CRISPR nuclease in column 5 of Table 1.

156. The composition of any one of claims 1-154, wherein the CRISPR nuclease is a nickase having an inactivated HNH domain created by an amino acid substitution at a position provided for the CRISPR nuclease in column 6 of Table 1.

157. The composition of any one of claims 1-154, wherein the CRISPR nuclease is a catalytically dead nuclease having an inactivated RuvC domain and an inactivated HNH domain created by substitutions at the positions provided for the CRISPR nuclease in column 7 of Table 1.

158. The composition of any one of claims 1-157, wherein the CRISPR nuclease utilizes a protospacer adjacent motif (PAM) sequence provided for the CRISPR nuclease in column 2 or column 3 of Table 3.

159. A non-naturally occurring composition comprising a CRISPR nuclease, wherein the CRISPR nuclease comprises an amino acid sequence corresponding to the amino acid sequence of at least one of Domain A, Domain B, Domain C, Domain D, Domain E, Domain F, Domain G, Domain H, Domain I, or Domain J of a CRISPR nuclease, wherein each domain sequence has at least 90%, 91%, 92%, 93%, 94%, 95%, 96%, 97%, 98%, 99%, or 100% identity to the amino acids identified for the domain in Supplemental Table 1.

160. A polynucleotide molecule encoding the RNA molecule of any one of claims 1-159.

161. A method of modifying a nucleotide sequence at a DNA target site in a cell-free system or the genome of a cell comprising introducing into the cell the composition of any one of claims 1-159.

162. The method of claim 164, wherein the CRISPR nuclease effects a DNA break in a DNA strand adjacent to a protospacer adjacent motif (PAM) sequence provided for the CRISPR nuclease in column 2 or column 3 of Table 3, and/or effects a DNA break in a DNA strand adjacent to a sequence that is complementary to the PAM sequence.

163. The method of claim 164, wherein the CRISPR nuclease is a nickase having an inactivated RuvC domain created by an amino acid substitution at a position provided for the CRISPR nuclease in column 5 of Table 1, and effects a DNA break in a DNA strand adjacent to a sequence that is complementary to the PAM sequence.

164. The method of claim 164, wherein the CRISPR nuclease is a nickase having an inactivated HNH domain created by an amino acid substitution at a position provided for the CRISPR nuclease in column 6 of Table 1, and effects a DNA break in a DNA strand adjacent to the PAM sequence.

165. The method of any one of claims 161-164, wherein the cell is a eukaryotic cell or a prokaryotic cell.

166. The method of claim 165, wherein the cell is a mammalian cell.

167. The method of claim 166, wherein the cell is a human cell.

168. A kit for modifying a nucleotide sequence at a DNA target site in a cell-free system or a genome of a cell comprising introducing into the system or cell the composition of any one of claims 2-159, a CRISPR nuclease having at least 95% sequence identity to the amino acid sequence selected from the group consisting of SEQ ID NOs: 1-11 and 13-39, and instructions for delivering the RNA molecule and the CRISPR nuclease to the cell.

169. A composition, method, product, process, system, kit or use, characterized by one or more elements disclosed in the application.
